United States Patent Application Publication US 2025/0051766 A1 - sequence listing, part 7

SEQ ID NO: 5065 - DNA, 58617616 bp, Homo sapiens (residues 10,855,116-13,026,138 of 58,617,616)
  source 1..58617616: mol_type = genomic DNA
caacctccaccttttgggttcaatcgattctcctgcctcagcgtcccaagtagctgggattacaggcacgtaacacctggctaatttttgtatttttagtagagacgaggtttcactatgttggccaggttgatctcgaactcctgacctcaggtgatccacccacctcagtctcccaaagggctgggattacaggcgtgagccaccgtgcccagccatctctttttttgtttgtttcttcagatggggtctctctgtgtcacccaggctggagtgcagtagcacgatctcagctcagtgcaccctccacttcccgggttcaaactattcttgtgcctcagcctctgaagtagctggaattacaggtgtgcaccacacctggctaattatttgtggggttttgttgttttttgttttgtttgtttctttttgagacagagtcttgctctgtcacccaggctggagttcagtggcgccatctcagctcactgcaacctccgcctcccgggttcaagtgattctcctgcctcagcctcctgagtaagtgggactacaggcacgtgccagcacgcctggctaattttttgtatttttagtagagacggggtttcacagtgttagccaggatggtctcgatctactgacctagtgatccacctgccttggcctcccaaagtgtggggattacaggcgtgagccactgcgcctggccaattatttatatttttaatatagacagaatttccctgtgttggctaggctggtcttgagcccctggcctcaagtaatccacctgcctcagcctcccaaagtgttgggattacaggcatgaatcaccgcacctggcctaagatatctatcctatgcaatgctagccagaggagtaaacctcttttcccagtggtaccaccaaagtcccagagttagctctcattggctccacttgggttacatgctcatcctgaaccaatcacaatagccaggagcgggggataggctaattggccagacacaaagtttgctaagtctcttgggtccagctgcattcatgttctttggttgggggttatggggtaagggctggctactcaaaggtaacctggagagacgacactgacctgcccactctcttttctgattttcctccagtgcccacttggatcttggtgctctccctgagcctggctggtgccctcttcctccttgctgggctggtggctgttgccctggtggtcagaaaaggtaacagcacgcaaagcctggcacacaagttgccagttgacaacttctggaacgtgaagatgtgcttacactcacaactcacaccattttgttttcaggttcagtaatttgttcatcacaccccttttaaaagtatttatttatttatttattatttttcttttcagacagaggctcgctctgtcgcccaggctggagtgcagtggcacgatctcggcccactgcaacctccgccttcgaggttcaagcaattctcctgcctcagcctctcaagtagctgggattacaggcgtgcaccaccatgcctcgccaatatttgtatttttagaagagatgtggttttgccatgttgcccaagctggtctggaactcctgacctcaggtgatccgcccacctcggcctcccaaagtgctgggattataggcatgagccacagtccccggcctaaaaattttttatttggagactcagtctgtcacccaggctggagtgcaatggcaggatcatagctcgctgcatccttgacctcctgggctcaagcagttctcctgcctcagcctcccaagtagctgggaccacaggtgcgtgccaccacatgcagctaattatttatttattttttttaggacagggtcttgctgtgttgcccaggctgggtaactcctgggctcaagcaatcctcccacctcagcctcccaaaagtcctgggaccacaggcacacactaccacacctggctaatttttaaaaaatattttttgttgagatagggtcttgctatattgcccaggctggtcttgaactcctgggttcaagtgatcttcctgcctcagcctcccaaaatgctggaattacaggcatgtgccaccatgcccagccaaattatgtgtgtttgtgtgtgtgtgtatgtgtgtgggtatatatgtgtgtgtatgtatatatatatgtgtgtatatatatacatacacacacacacacatacatatatatatatatatatatatatatatttttttttttttttttttaagatggagtcttgccctgtcacccaggctggagtgcagtgaggcgatctcgactcacttgctctgttgccagcctggagtgcagtggcacaatctcgactcagtgcaacctccgcctcccaggttaaagtgattctcctgcctcagcctcccgagtagctgggactacaggtgcgtgccaccacacccagctaacttttgtatttttagtggagacagggtttcaccatgttgtccaggatggcccagcactttgggaggccgaggtgggcagatcgcgaggtcaggagtttgagaccagcctgggcaatatggtgaaaccccatctctaatgaaaacacaaaaattagccgggcgtggtggtgtgcacctgtagtcccagctacatgggagggtgaggcagaagaatcgcttgaacctgggaggcagaggttgcagtgagtcaagatcataccactgcactccagcctgggcgacagaacgagactctgtctcaaaaaacaacaaaaaaagaaagaaagaaagaaagaaagaaagaaagaaagaaaaatctgaggccttccaggctgggtggggtggcttgcctgtaatcccagcactttgaaaggccgaggcaagtggatcacttgaggtcaggagttcgagaccagtctggccaacatgacgaaccctcttctctactaaaatacaaaaatagcctggcctggtgatgcacacttgtaatcccagctactcgagaggctgaggcaggagaattgcttaaatccaggaggcagaggttgcagtgagccaagattgagccactgcactccagcctgggtgaaagaatgagactctgtctaaaaaaaaaaaaaaaaaaaaaaaaaacagaaattgccggatacaattaggaccaaaatctaacacatgctcatttcttttttgttccagttaaactcagaaatttacagaagaaaaggtgagatcatccctggagacccacagagggtggtttggggaaagaaggacacttccctggcagggtgggcactccatgccccccacaaacagcgcctcctggtgggcatgctgcgtaataggaacaggagccatttattaagtgcctcctgtgtgctggaggactgagctgggactctctgaagctggagctccttatccttatggcagccctggaaacaggcaccatgaatagccctattttacagaagagaggactgaggctcagcactcagtcacagagtgagcagtttgcccagggagaggcccttccccacacccctttacctccagctgccagaaaacggtcacaatcactctagacacccacagtcagtttctaaagaatgcccctggggttgtgcagtgcccaattgcactgtaggtgatggcccaggttcctgggcaccaggatgtcctaactggccctggcctcagtttctctcctccgagagtggggagacatcctgctgcctggagatgaaaacctgctctggggattgaatcccagcttcacctggctgtgggcctcctaaccaggagaatatatatatgtttttttttttttttttgagatggagtttcactcttgttgcccaggctggagtgcaatggcctgatctctggctcaccgcaacctctgcctcctgcgttcaagcagttctcctgcctcagcctcctgagcagctgggattacaggcatgtgccaccacacccggctaattttgtatttttagtagagacgggatttctccatgttggtccgggtggtcttgaactcccaacctcaggtgatccgcccgcctgtgcctcccaaagtgctgggattacaggcatcagccaccgtgcctggcttttatatatgtgtgtgtgtgtgtgtgtgtgtgtgtgtgtgtgtatgtgtgtgtgtatatgtgtgtgtgtgtatgtatgtgtgtgtgtgtatgtatgtgtgtgtgtgtgtgtgtatatatatatatatatatatatatatatatatatatttttttttttttttttagacggagtctcactctgtcgcccaggctggagtacagtggcgcaatctcggctcactgcaacctccgcctcctgggttcaagcgattctcctgcctcagactcctgagtagctgggactacaggcacatgccaccacacctggctaatttttgtattttttagtagagacggggtttcactgtgttgtccagtctggtcttgaactcctgacctcaagtgatccacctgcctcagcctcccaaagtgctgggattacaggcgtgagccactgcgcctggcccaagagaatttccatgtttttttcttcccccggccaaggggctgtcccacagtgtgacagctccagaaatcaggatgttactgctcttctgtggggaagacccatgggtcagtgggtggggagcaaaggctacattttgggtgtggtttggggccagggctttcccgatcaagcctcctgactcaaggggcaaccctgatccctgtcactttctcctgaattcctttgcagagatcgagaatcctgctgggcccagattaacttcgacagcacaggtctgtgcctccacactcctgactccagtggggaaaggattacacctccaaatgccatcaggcctcatcacacaccaatcaaatttcttctgtgactgcttgttccctttagggtcaaaacacaccctcgccacctcttcccctgggttctcaccttctctcctttgacttaacctaaaggtcacctcctctgggaagccttccctgactccctagacagggtctgtgcctgctacttacaggaccccaggtccgaccattcttcttacccctcggtagaaatacaattaggcggccaggcgcggtgactcacaactgtcatcccagcactttaggaggctgaggcaggcagatcacgaggtcaggaattcgagatcagcctggccaacatagtgaaaccccgtctctactaaaaatacaaaaaaattagcagggtgtggtggcggacacctgtaatcccagctacttgggaggctgaggcaaggagaatcatgtgaacctgggaggcggaggttgcagtcagctgagattgcgccactgcactctagcctgggcaacagagccagactccatctcaaaaaaaaaaaaaaaaaaaaaaaaaggccaggcgtggtggctcacgcctgtaatcccagcactttgggaggccgaggtgggcggatcacgaggtcaggagatcgagaccatcctggctaaaacagtgaaaccccatctctactaaaaatacaaaaaattaggtgggcgtggtggcgggtgcctgtagtcccagctgctcaggaggctgaggcaggagaatggcgtgaacccaggaggcagagcttgcagtgagcccagatcgcgccactgtactccagcctgggcgacagagcgagactccatctcaaaaaaaaaaaaaaaaagaaagggccaggcacggtggctcacgcctgtaatcccagcactttgggaggccaaggcaggtggatcacgaggtcaggagatcgagaccatcctggccaacatggtgaaaccctgtctctactgaaaatacaaaaattagctgggcatggtggcgtgttcctgtagtcccagctacttgggaggctgagacaggagaatcacttgaacccaggaggcagaggttgcagtgagccaagattgcgccactgcactccagcctggtgacagagtgagactccatctcaaaaaaggaagaaagaaacaaaaatgaaacaattaagtgatcattgggtgcttgcatatttcatactcatttcctctgctgaacggccagctccatggggaaaggaccatgtctatctccgggactccagggccacacttgccttccagaacatgccattctgccagcttccccaagggggcgaaaggcagccagtctgtcatgcaggatattctcttgaaggcaccccaagcagagaaatgtattctctgtacttcattcctggtccaacacacacacttattgagcacttactatgtgctaagatctgagagggtcctttcgtaaccaagacagatgtgctgtctgtccacaagcccattctccaatgggaaacagcccgtgatggcaccagactgtgtctgggacaaggcaggtggtcccctgaggaagtgatgtttttctttttttttttgagatggagtctcattgtgtcgcccaggttggagtgcagtggcacgatctcagcttactgcaacctctgcctcccgggttcaagtgattctcctgccccagcctcccgagtagctgggattacaggcacgtgccaccatgcccggctaatttttgtatttttagtagaggtagggtttcaccatgttggcctggctggtctcgaactcatgacctcaggtgatccacccacctcagcctcccaaagtgctgagattacaggcaattacaggcgtgagccaccgcccttttgttgttgttgttttttgtttgtttttgttttgaggcggagtctcactctgtcgcccaggctggagtgcggtgacgcgatctgggctcactgcaagctctgcctcctgggttcaagccattctcctgcctcagcctcctgagtagctgggactacaggcgcccgccaccacacccggctaattttttgtatttttttagtagagatgggatttcaccatgttagccaggatggtctcgatctcctgacctcgtgatctgcccgcctcagcctcctaaagtgctgggattacaggcatgagccaccgcgcccagcctgtttttttttttttttttttttgagacagagtcttgctctgtcacccagacaggaacgcagtggcgcaatcatagctcactgcagcctcgacctcctaggctgaagtgatcctcccctctcagcctcctgagtagctgggaccacaggcatacaccaccacactcagctactttttaaatttttttttctagagacaaaaaattatgttgcccaggctggtcttgaactcctgggctcaagtgatcctccctccttggccttccaaagcgttgggattacagccgtgagccacctcacctggctagaagtgatgtttaagcagagacctacaagaatgggtaatggaggccgggtgtggtggctcacacctgtaatcccagcattttgggaggccgaggcaggcagatctcttggggcaaggagttcaagaccaacctggccaacatggtgaatccctatctctactaagaatatgaaaattagctaggtgtagtggtgcatgcctgtaatcccagctattaggaggctgaggcaggacaatcacttgaacccaggaggcggaagttgcattgagccgagatcctgtcattgcactccagcctgggcaacagagtgagactccttctcaaaaacaagaaaaaaaaaatgggtgatggagcaattggaggagagcctggggaggaggaggagctggcaggtgctccttctggaaggcctgagataagacacccattttcctgagggcagtgagagatacccctaggaagactgtgtgtagaaggacttggttcactttgtagctgtgaacagttcaccgtgcagaatgggttggaaaggcgccatagaggatgctgggagatggaccccaattgcttccctgtgggctggggggcagtgcggggatggcagggagcagggaagttacaactggcccccaatcctgggttttctttctctttctgtttcagacatgtccttcgataactccctgtttaccgtctccgcggtgagtggttctttttcttggaaccggttttctgctgaccgtcctaccgggagaacggggcgggctcaaggggcaccacgaggctaagttgacctgctgtctctaagctgcgggggggctaggaaaagcccagaatcactgaacagggactcagtagtgagccgagagttggctgtgaaaaaatcccagggggtgtgttaattgaaggtggtgacgtcaggctgtcttgtggccacaggcaggcaggccccttggtggtatgtcctggcctggtcagtgctgcctttggtctcagtcatgacagcccctcagaatggtgacagaggattcagggtgacctggtggcctctcatagaggcttgtgacaatctgtgtcacaatctgtgacaggctgtggtcggtcccctctgggtataaagaaaagcatgaagttgctgggtgcggtgactcacgtctgtaatcccagcactttggaaggccgaggcgggtgtgggtcaggagtttgagaccagcctgaccaatatggtgaaacctcatctctgctaaatacaaaaaattagctgggcgtggtggtgcatgcttgtaatctcagctacttgggaggctgagacaggagaatcacttggacccaggaggtggaggtagcagtgagccaagattgaggcattgcactccagcctgggccacaagagcaaaactccatctaaaacaaacaaacagataaaaatgaaaaagtacaaatgccaaggctaccccaaaatgtagctgtgcagagagtcccatagacccaggtttaaatcccagccctgacactgtgtgacaatggggaacaatatcccccaaaagcagagggagggatttgttttttttcaagacagagtctagctctgtcgcccaggctggagcacagtggtgtgatctcggctcacacaacttccgactcccgggttcaagcaattctcatgcctcagcctcccgggcagctgggattacaggcacatgctaccacacccagctgatttttgtatttttagtagagacgggggtttcaccatgctggccaggctggtctcaaactcctgacctcaggtgatccactgggattacaggtgtgagccaccatgctggctggctgcggaagctgctttagacaggagatcaggaaagtctgagatgggtgacaagcaggaggtggggaagattggggatgattgatccaggctgaggacacatttttggcacagcccagtaagctggggtggagtgaggagtcgaaggggaccccatgaagaactttgattttactgctattgagctgggatcccggaagggttcctagtataggagggaggggaccggattcaggtgcacacaggcgccctctggtggcttctgcaggaggacagatttggggaaagcggggatcagtggaaggcaggagcctggagactgaagagctgggccaagcgtgcaccaaagggtgggtggtttggtccaaaatgttggcagtggagttcgaagaagtgatcagatgcaggttaggggagatataggggagagaaaacacagagctgatttttgatgagggggccaagggagaagagggaggccaaggagggtgaggcttggagggtcaggagtgtggagtcagccacctcaacccatggcgcctgggagcagatggagaggggagtctacagttcaggagagaggtcagttctagagatagactaggagtgcctgggatacagatggtaggaaggaagggggcttggcacgggcctgtgcagccctctgaggtctctgcttccagaataaatcctgaggccataagaaaaacccggcaggcagggctcaatctaaacgtttccatgagaatccacaccgcacagaacaccagcctggtgatgccccctctccccactttttgaggtagtttttatttatttttgtttgttttttgagatggagtcttgctctgtcacccaggctggagtgcagtggcttgatctcactgcaacctccacctcctggattcaagcgattctcctgcctcagcttcccgagtagctgggattacaggcgcctgccatcgcgcccggctaatttttgtatttttagtagagacgggttttcatcatgttggccaggctggtctccaacaaccgacctcaggtgatccgcccgccttggcctcccaaagtgctgggattacaggcatgagccaccatgcccggccttttatttgtttttttactttttttttcttaaattaaggaccaggcgtggtggctcatgcctgtaatcccatcactttaagaggccgaggtgggaagattgcttgagcctgggaggttgagtctgcagtgagctatgattgcatcactgcactccagcctgggtgacagagcaagactttgtctcaaacaaacaaaaaatttccgtatgaaaagcattcacatgtcaaaatatacaataaagttttcttactaagccatgcctcttcatccattggtattcctttctgcagacatacaggtaaccactgttagcagctgcacgtggcaaatacacgcagaagtggatctgtaccttcacccaccacccccgccaatttttttttgagacagggtcttgctctgtctcccacgctggagtgcaggggcaccatcatagctcactgcagccttgatcacctgggctcaaaagatcctccagcctcagcctcccgagtagctgggaccacagacttccaccaccatgcccagctagtttatttttatatatatatttatttatttatttttcttcctttttatttttaaattttattttattaattttttgagatggagttttgctctttcgcccaggctggagtaaagggatgtcatgatcttggctcactgcaacctccccccctgggttcaagtgattctcctgcctcagcctcccaagtagctgggattataggtgcctgccaccatgcctggctaatttttttttttttttgagacggactctcgctctgtcaccaggctggagtgcagtggtgccatcttggctcactgcaacctcaacctcccaggttcaagcgattctcctgccgagtagctgggattacaggcgagcgccagcatgcccagctaattttttttttttttttttttgtatttttagtagaagcggagtttctccatgtttgtcaggctagtctcgaactcctgacctcaaatgatccacctgcctcagcctcccaaagtgctgggattacaggcgtgagccaccaggcccggccttttttttaagatacagtttcactttgttgcctagtctggagtgcagtggtacgatcttggcttgctgcacccaggttcaagcaattctcatgtctcagcttcccgagtagcttggattacaggcacatgccaccgcggctggctaaagtttttttttttggagacggagtttcgcaattatcgtccaggctggagtgcagtggtgccatctgcagcctccacttctggggttgaagcgattctcccacctcagcctcccaagtagctgggactgtaggtgcctgataccacacctagctaatgtttgtatttttagtagatacagggtttcaccatgttggcctggctcgtcttgaactcctgacctcaggtgatccacccacctcaacctcccaaagtgttgggattataagcatgagccactgcacccagcctaatttttgtataatttttgtatatttttagtagagacaaggtttcaccaagttggccaggctggtctcagactcctgacctcaagtgatctgcccgcctcggcctcccaaagtgctggggttacaggcatgagccaccgtgcccggcccagaaatttctcatcctcccaaacttgtctccgtgcaacacccactccccgttgtccctcccccagcccctggcacccaccattctcctgtctctgtggatttgcctcttctggacatctcatggatatgagatcacatgatatttttccttttgtgactggcctgtttcgctgagcttgatgtcctcaaggttcattcatgccatacgtagcctgtgtcagaatgtccttcatggcaggcacggtagcacatgcctataatgccagcactttgggaggccaaggcgggcagatcacctgaggttgggaattcgagactagcctgaccaacacggagaaaccccatctctactaaaactacaaaaaaaaaaaaaaaaaattagccgggcatggtggcacatgcctgtaataccagctactcgggaggcttaggcaggagaatcacttgaacccaggaggcggagttgctgtgagctgagatcacgccattgcattccagcctgggcaacaagagcgaaactccatctcagaaaaaaaaaaggaagaacattctttttttttttttttttttttttttttttgagacagtgtctcactctgtcgcccagactgcagtgcagtggtgtgatctcggctcactgccacctctgcctcccagcctccagcgattctcctgcctcagcttcccaagtagctgggattacaggcgcctgccaccatgcccggctaatttttgtagttttagtagagatggggtttcaccatgttggccaggctggtcttgaactcctgacctcaggtgatccgcccgcctcgacctcccaaagtgctgggattacaggtgtgagccaccgtgcccagcctgttcttcctttttaaggctgaatcatattgtgttgtatggatacaccaagttttgttgatccattcaattgttgatggacacttgggttgtttccaccttttggctgttgtgcagaaccgtgccatgaccatgggtatgcaaatttcttttggagtctctgctttcacttctagtttccttttgaagccttatactgctttgtcgttggctgaaatggtaaggcagcagctgacctgtctctagctttccccattaccttgctgagtgtctgatatgcaactttgtaacaccctttcaggtgggatcgattattttctttttacgaacaaggacactgaggctgataatgggcctagggtcacccagcttgggagggacaggactgtgggtggaacccccagcctgctgtcaactgagtggctttagttctagcaaattcatctctctttaactaggatcagggtcaggagcctccaaggcagaggaggaggtagacttttgaggaatgttttgcccatgggcaaatgggaggggaggaggagataatactatttattttttatttatttatttttttgagaccaagtctcactttgttccccaggctggagaggagtggcaggatctcagctcactgcaaccttcacctcctgggttcaggtgattctcctgcctcagcctcccgagtagctgggattacaggcgtgcaccaccacacctaatttttgtatttttctgagagggtttcaccatgttggccaggctggtctcgaactcctgacctgaggtgatccacccacctcggtctcccaaagtgctgggattacaggcgtgagccactgggcccaacagaggagataatatgaatggttgtgttcacttagcaaagaagagcttacgatgtgccatttgctttatcagttttactcttttaagcctcatagcagccctaggaagtggtgggtactagcattctgcccgttttgcagaaggggaaactgaggtatagaggggtgaagccacacaactgaggttacactgctataaagtgaaggaactggtgtttgaatccatgctctctggtccccagtttagcagagaggaaggcaggagaagggaagaccaggacaggtgggtgtgggtgggggcgggatgagaggagacctgctgggctggcagagtctcaggctcagaacatggagaaaccctagatcctgaaaccccaaatcacccacttctgtgtttcttcttacatggacaaagaaaacgatgccagaagaagacccggccaccttggatgatcactcaggcaccactgccacccccagcaactccaggacccggaagaggcccacttccacgtcctcctcgcctgagacccccgaattcagcactttccgggcctgccagtgaggctgaggactgggggacccctctgtctccaggcattcgggggcctgaggtccctccagctacttctgggggggctctgtcagccactttctcagggaattggacagaggaaaggaaggggaaccctggccttgggattttcatcacagaggagtgggagaggggacacaggcatgggcctggcactatacagacaacaggaagttcccctctcgaccttcggctcctcaggaccaccagagaaggagatgtcaggaccccttcttgtcccccagctgggccataagacgtcccaggtctctgcacacccgtggaattcctcccttccccagtgggtttttgagcatagggtgcccttgggtgtgttgtgtgtctgcctgctggcttgcttaagttattaattataacacgggtcaaggtgttcccaggcctctatggagtggaatccttcaagctggggacctctggatcccatggttggatggctggggggtggagcgtgtctgaattcaccaaatttgaagcatctctcaagggcagtcagggtggtgtatgcggagcctcctgggggtgtggggagtgcagcagtgccatgccagggtctctgcaacggtacttgcattagagggtttaggaggtggaatgacaggggctacgggtgagggacatgaaggagaatgagggcccctcgcagtggctcacacctataatcccagcactttgggaggccgaggcagggggttgcttgagcccaggaggttgaggctgcagtaagctatgatggcaccactgcactctagcctgggcaacacagtgagaccctgtctcaaaaaacaaaaggggccgggcgcggtggctcatgcctgtaggcccagcactttgggatgccgaggcgggcggatcacctgaagtcaggagttcaagaccagcctgaccaacatggtgaaacctcgtctctactaaaaataaaaaattagctgggcgtggtagagcatgcctgtagtcccagctactcgggaggctgaggcaggagaatcacttgaacccgggaggcggaggttgcggtgagctgagatcgagccattgcactccagcctgggagacagagcgagactccgtctcaaagaaaaaaaaaaaaaaaaaaaaggaatgaggcgtaaatgaggtctagggaagagttaaagctggagtgctaggaagtggcccaagctcactgggtcgcccaaaagagatggggccacccaaaatgaagggggatgcagagagaagacgggtttgtgtggcgggagaggggccctgcgccgggccaggctggactcagcatcgttggaggaggggctgagagaggagggggtcaaaggatatcttgtgcgaaaggagacagtcaaacattaaggattaagaaggcaatgtgggcagagatgatggggaagggaggaggagcggtcgaatgtcggggaggggtcctttcaaccgggctcaggttgctcctggaggccagggctcatcggaaatcgtcggtgcgggggcggtggggggaagggttgggggcgaggcccgggcgctggccacgccctttcccccgcccattccccagagcggggcggctgacaaagcgagtccgggtgggagggcgcgggcaggcacgggggcggggcctcgtcgcggctgggccacgcctccctgagggctgcctcacaaagccgggcgggcccgggggggtggggcccagtctcaggggcgtgtccaggtcggggcagggaagccgcatcacgacgcgcggctgcttgtgtggggcggggtacagggcgtgtccacgcggccgagcaccgcccccgccgtccccgcaccgcctcactcgaaagcagccgttaatgaggcgccggcctgggggcggggcccaggcctccgaggggcgtgcccgcgcgcccgagcaccgcccccgacgtaccctcccgccccgcagttcccgggcggtggagccacctcacaaagcggcgaccgttctcgcggggcggggcgtagccggtcccgccccacggggtgccctctcgttcgctcgctagctccccgcgcccaggacggccggcagagggcgctgcgccacggggccgggccgcggcgacggtggcggcggcggcggcgaggcggcgcgtggccggcaggcggcgctgcccggctcggcctcggcctgcacggcggctgcggcggcggtagcggcagcggcggcggcggcggcggcggcggcggcggcggcggcggcggcggcggcagcggcggcggcctgggcccgggcgcagcggcggcggcggcggggcctggagccggatctaagatggcagcggcggcggcggcggtggggccgggcgcgggcggcgcggggtcggcggtcccgggcggcgcggggccctgcgctaccgtgtcggtgttccccggcgcccgcctcctcaccatcggcgacgcgaacggcgagatccagcggcacgcggagcagcaggcgctgcgcctcgaggtgcgcgccggcccggactcggcgggcatcgccctctacagccgtgagtacggggccccggggcaggcgcagggccggggctgctcacgaggccggcccggggcgggggccggcggggaggggccctgagcgcgggggcctggcgtggggtccccgggactgagccggtggcctgcagggagcgaccgtggagggccggtgccaggggacagacagagaaaagagggcgtgcgtggtggccggaggggcaaggtgcccagagtgagcaagggagcgcgaaatggggagtgaagggcctgagatttgggaggggtgggtgagcaggaagtggggggctctgagtggaaggggaatttggaggacgccaggcgtggtgggcttaagcgtgggggagggaggtccggggtgcgggagaggtgggcgtctcgggggcgggcgtggccgcctctgcagggaggagggtggggcgtgggcggcccgggatccctctggggaccccctggatagctcaggacggttggaaagtgtttgctggtctggggcgcccgcgagtaccgagttccaccgctgtgcgaggtgtggcgttcaggacccccgaatgggaaacttcaggatctggggagagggcccatgcggggacggtgggagccgcagggtgagctcctcgtggaaacgtggacgggacgggccccttcctgatgccgggcttcgaagtaagagctaacagcctcctcccatcttcttttgggggatgtgagaagctggttacattttccgaagctgctttcaaaactgacatttcactggggggaaaagaaaatcacaaatgcgtttgccagcaccccccacccccgctcccagtctttgtagttcattcttcttcttgttactccttcttatctcttctctttgattccttgttcacattttgctactctgtgtcatttggctttgtctttcagggcttcttgcactgatgccctggggaacccctcaggaggcctctagctagcttgggtcctgtgtgaattttttgccactttggaaacggcccgattaaaggaaagcccgaggagcagtccgttcacactgggttttccctgcacctcgactttgaaaacgtggactaaaggagttgtgtctgctgtccgagggtgccgtctctttttgctggtgcagagcctgggtcttcttggaccagatgagaggggaaggagggtatttcagcgggggtttcagagttcaaggcagacactcagctcaacagaaccccagatcataagcaaaacctattcactgggcaagcattggtagccaactttgtcctgaacagaacaaagcggggcagcgtttccaaaactagggtcccagggcttatcctcaaaggagttccaggagagttggctatcatttttaagtaaacctttaaaaaatttttttaggaccaggcggggtagctcagcactttgggaggctaagcactttgggaggatcacttgaggtcaggagttcgagaccagcctggccaacatggtgaaaccccgtctctactaaaaatacaaaacagcggggtgtggtgacatgtgcctgtcccagctactcgggaggcagaggcaggagaatcacttgaacctgggaggcagaggttgcaatgagctgagatcgtgccattgcactccagccggggagacagagtgagactccatctcaaaaaaaaaattttttttagaacaattttagtttagtttttttttttttttttttttttttttttttttgagacagagtcttgctcggtcccccaggctgaagtgcagtggctcaatctcggctcactgcaagctctgccacctgggttcacgccattctcctgcctcagcctcccgagtagctgggactacaggcgcctgccgccatgcccggctaattttttgtgtttttagtagagacggggtttcaccatgttagccaggatggtcttgatctcctgacctcgtgatccacccgccttggcctcccaaagtgctgggattacaggcatgagccaccccgcccggccagaacaattttagtcttatagatgtattggcaacatagtgagatgttcctaccatcttattcctggagtaacattttgtgtttgtatttgtgtttttgtttttgttttgttgatactcttgaaagtattacttgttattaagacagcacttctctttgagaggtaattggtaactgaaacattttttattattagagacaaggtttcactatgtcactgtgttgcccaggctggtctccaacttctgagctcaagtgatcttcctgcctcccagaatgctgggattacaggtgtgagccaccccacctgaccggaaacattcataaaaaggagaaagtccacattcctcagagagcctcagtcccagattcccagatgatatatccttagggttctgaaataatttttttttacacttttttgttttttttctttcttttttattttttttatttttattttttattttttcagacagggcctcactctgttgctcagactggagtgcagtggtacagtctcagtctcagctcactgcagccttccatggctaaagtgatcctcatacctcagcctccctagtagctgggaccacaggcatgtgccacacccagctaatctttcatattttttgtagagaaagggttttcactgtgttggccaggctggtctcaaactcctgggctcaagtgatcctccctccttggcctcccacagtcctggaattacaggcatgagccaccgcaccgccctctttatccttaagtaacattgatatggagataaaaaacatgggttcttggccaggcgtggtggctcacacctgtaatcccagcactttgagaggttgaggcaggcgaatcacttgaggtcaggaggttgagaccagcttggccaacatggcaaaatctcgtctctgctaaaaatgcaaaaattagccaggtgtggtggtacctgcgactgtagtcccagctactccggaggatgaggtgggaggatcgcttgaaccagggaagcagaggttacagtgagctgagattgcaccactgcatgtcagcctgggtgacagagcaagaccctgtctgaaaaaaaaaaaaaaagcatgggttctggagttggaggtgatcagtgctgggtgtattaatttcccatggctgcaataacaaattatgacagatttttggtttaagacaacaggaatggattctctctcagttcatggtcagaagtctgaaatcatggtactggcagggccacaatccctggagaggttctacaggaaaatccttgcatcttccagattgcagtggatccagctgttgcttgatttgcagcagcgaaacccaagtccctgcgtctgtcttcactcctgtgtcttgtgtcctcttttttccttttttttttaaagtgagatggagtctcgccgtgttataggctggtctcgaactcctaggctcaagtgatcctcccacctcagctgttcttttcttttctttttttttttgagacggagtctggctctgtcacccaggctgaagtgcaattgcgcgatctccgcttactgcaagctctgcctcctgggttcaggccattctcctgcctcagcctcccgggtagctgggactacaggcgcccgccaccacgcccggctaattctttgtatttttagtagagacggggtttcaccgtgttagccaggatggtctccatctcctgacctcgtgatctgcccaccttggcctcccaaagtgctgggattacaggcttgagccaccgtgcccggccccagctgttcttttcttataaggacactgggcattggatttagggcccactttatatctaggatgatctcatctcaagatccttatctgcaaagaccctatttcctaataaggtcaccttcacagattccaggggttacaacttggatgtctgtcttttttttttttttgagatggaattttgcccaggctggagtgcaatggcgtgatctcggctcactgcaacctctgcctcccgggttcgagcgattcgcctgctttggcctcccaaagtcctgggattacagggattagaggcatgtgccaccatgcccggttaattttttttgtatttttagtagagatggggtttctccgtgttggtcaggctggtctcgaactcctgacctcaggtgatccgcccaccttggcctcctaaagtgctgggattacaggtgtgagccaccgccaccagcctcacatatggctaatttttaagtttcttctagcgatgcggtctcactattttgcccaggctggtcttgaactcctgggctcaagcagtcctcctgccttggcctcccaaagtgctaggattacagacgtgagccactgcgcccggccaataaatatttatgtccatgttactgacagcagtgttcgttggtgtggcatgggaatgagctagcttttctaggaggagccccctatgctccagggctgccccgctgtcttggctcaccggccatgggagggagtcctgggccatgatctgtacctaacataggaggcccaggagaggcacgtggggaggacttccagccctgttccttgacgtctgcaccctccaggggaaggatgacagctgcagaagggcctgtctctgtcactctgtagtgaacagttacttcttgccatctgaagtcaccctggcctacgtccatgagattggccaaatggcaactaccaacaccaggccattttccctgtgcagagggggaggccctttggcgtgggcttcctgggcttgaggaagctttggcatggcctctggagttcctgggcataggctgccctcccttggaaaggaggcagtttctcagggaggggtgccgggaaagagaacagaacaaactctcacttccccagccctgtggcgctctttctggaaatgactgtgtcacttttctttcttggtcagcacgagtcagtgtggccagtgctttagactctcccatccccttggctcagaagcttacacagcagcatgggctccgtcaggggctaaacttcagtttgtgaggggcatgccatggggtggaaagttcagagaaaaaccctttgtccaaagaaggtgaagaatggcctgctgtcaccgaaccaggggcccttgtgacttcctttggttacactcctgggatccccctgacagctggggcaggggtatagaagagcttgttatgtgccccatctttaggacatctcggtgtcaagctggagtgacaacagggaaagttagtaaccccagaaaggcatttgtgtttcagcggtgcctgcgtgtggctaatggataccgtcatttattgagcatttatcccgtaccagactgtgcataaacttgtgttgactcaaaatgcttgaccttgggggcagctagggaaagggcagtgatataaattaggcctatgggccacattgagcctgtggcctatttttatctgtgtttgtattttattagtgagacagagtctcactgtgttgcccaggctggagtgcaatggcatggtcttggctcactgtaacctccacctcccaggttcaagtgattctcatgcctcaccctcctgagtagctgggattacaggcctgtgccaccaccctggctaatttttgtatttttagtagagacagggtttcaccatcttggccaggctggcctcgaactcctgacctcaaataatctgcctgcctcagcctcccaaaatgctgggattacaggtgcgagccaccgcacccagcctgtgttttattatttatttattttgagatggaatctcgctctgttgcccaggctggaatgcagtggcgcaatctcggctcactgcaacctctgcctcccaggttcaagcgattctcctgtctcagcctcccgagtagctgggattacaggcacatgccgccatgcccagctaattttttgtattttagtagctcactgcagcctctaactcctgggctcaagtgatcctctggcctcatcctcccaagtagctgggactacaagcacatgtcaccacccttggctaatttaagcaatttttttagagacagagtcttgctgtgtttcccaggctggccccaaacccctggcctcaaaccatcctcctcctgcctgagcctcagaagtagctgggattatagtcacgaaccgctgggcccggtgtggcctatttttgtacagacaaagctaagaaaggcttttacagtttttgagagattgattagggaaaaaaactaaaacccaatccacaaacaacaataatcagttgagaccacagtgtcctgcaaaacctgaaatatttactcactggcccgaggcaggggaagcttgtagacccctgggataaatgaatgaggcaggcaggagttggggtctgtggggagtttggccccagccaaaagagaaaccaaaaaatcctcaggccgaatagagcatacttctgaattgtgtgagccccttgtgccaattgtggcgcttactgtatgttaccacttactctgaaaagagttctgtgaggtcagagataccaaccccaatttactggtggaaaaacagaaatgaaagaacttgactggccaaagtgatgtggttggcaggcagcagagatggctttggcattctgggtgactggatgcccaccttaaatgcatatataagtggttcagtgacatttatctgttcatcacaaagacccaaagtagcagaggcttaattaaacacgatggcattttattttttgtgctctaatgctaaagtgtgaagattgtcaggtgccaaagtctcctgggctcttggaagttcccagatccaggtcctccccccggctttttttttttttttgagatggtgtctcgctctgttgcccaggggctgcagtgcagtggtgtgatctcagctcactgcatcctctgcctcccgggttcaagcgattctcctgcctcagcctcccaagtatctgggactacaggcgtgtgccaccacggctggctaatttttgtatttttagtagagacggggtatcgccacgttggccaggctgttctcaaactcctgacctcaggtgatccacccgcctcggcctcccaaagtgctgggattacaggccactgccccaggctgatcctccaccattcttaaggtgaggtcttgtcctcaggtttcagcatgactgctggagtcccgccattacaccctggcttccagacagcaggacagaggaagggacaaaggagaaagggtgcaaaggtcacatccaggtgtttgttaagaaaggttcccggtagctgatgcaaggtgcttcagctttcattttgttggctagaatgtagtcacatgatcactgccagctgcaagggatgctgggaaatgtagttttcaatctgagcggccatgtgctcagctgaatttagggttccagtttccatggacaaagagagaacatacagggagtcaccttggccacagtgggtaggatctggacctggccagaatgttgggaaggacgtttctgggttatggagaggtgctccagtgggccagggctggagacagccacctggcttggagcacagggtcccctgtgaggagtggaggggctaaaagtggaaacagggctgggttggaatcgaggatttttttggtttttttggagatgaattctcgccctgtcacccaggctggagcacagtggctcaatgtcatctcactgcaacctctagcctcccaggttcaagtcattctcctgcatcagactcccaagtagctaggattataagtgcgtgcaaccacacccagataatttttgtatttttagtagatacgggggtctcacccttttggccaggctggtcttgaactcctgacctcaagtgatccatctgccttggcctcccaaagtcctaggattaccggcatgagtcaccgcacccagcctcaggtgaaatcttaatggaaggtgtccagtgctgtgagcagctcctggtcaccaagcactggccctctgtgtagggggtctggatgagatgggtgggcaaggcctttcaacagaagctggagtgtggtgtgaacttgctaatgactttgagatgccaagcctcacacacctcagaccaggttggatttagcaggtggagaggctcaggaagacctctgtggcaggtgtgtctcctttctgcggaaacctgctgcttctaaggtctgctggagaacctgggaggtggtgagtttgcaaagacatccagggaagcagccacttaagcgagggcaggatggaggggcccacctgggccacacctggctgcttgaggtggcgagttgaggctgggaggggtttccatcagttccatcagctcagagctaggatttttttttcttctttttttgagacagggtcttgctgtgtcacccaggctggagtgcagtgacacgatcatagctcattgcagccttgaacacccaggctcaagggattctccctccctcagcctctctacaggctgggaccacaggcgcacatcaccatgcctggctaatttttttttttttttttttttgtagagacagggtctcactatgttgctcaggcggatgtggaactcctgggctcaagcgattctcctaccttggcccccaaagtgctgggattacaggtgtgagtcatggcagccacggctccagagctcgggttcttaatctggtctgtggatggcccctgggggcggtcccatgagcccctcacaattggacacagttttgcaaaggggtaaaaggacaagaatcggtagctgtgactgtggatgagcctctgagcttcactttccctccctgaaagggggtgacagtggcacctccctggaggttttcgtggaggggaggaaacacatgtaaaatacttcaccccagttgggcacagaggctcatgcctgtaatcccaggttttgggaggccgaggcagcagggcggtttgagtccaggaatttacaaccagcccgggaaacacagtgaaactgtatctcttaaaaaataatttaaaaaaattagccggcatggtggcacatgcctctagtcccagctattccagaggctgaggcgggaggattgcttgagcccagaagcttgaggctacattgagccataatcgtaccactgcactccatcccgggaaacagggcaagaccttgtctctaaaaaaaaatgcttcttgcttgatgacttgtgatatatgaaaaggaagaaagaaaagaaaagctttgccctgtgtgcctggcccgaagtaagtgctccataaattggccgtggtgtagctgtggattctctgcacatttttctgtgcagaacctcccctgatttcggtcagcttctcagaaggatctgtgactgaaaaagggtaccagttcctggaggacagcacctgattggggagtggagtctgccctggctggtaagggattgggggctctctgcgcagggccaggacatctctccagggacaggcgagaagctttgaaagggcaggaaggagagggcagcaaggtcagatgccgtgagaggtcagagtgagagccaaggggcggtcactggatttctgagcaggaggtcacaggtgacctcagagagcagtcccctggagggctggggtgggggaggggccagccagatggcaggtcttgggggaggtgacagtggagctgcagagagagcaggggggacggtgacctttcccagcccactgagacccactctttcattcattcagccagaaacaggcagcgaaagtggactcgccgtctccatagtgcggtagctcccatccagccagcttgaaatggtcagcagaaattcaccaagcgtctgctgtgcaccagttactgttttaggagcccagggatgtggtgacacccgagataaacacaaggtcccacatttgcaggcctggggacattgtctgaggagcgctaaatcagcaatcacttaaaacaagctgaggggctccaggatgctgggggaggggctctgcttagagggaggctgagggcagagtcgtgcttgtggtaagagctctagcaggggccagctggcaagtcctgatccactccttagcatcccggtgaccactttgtgcctcagtttccttggctgtcagttgtggatcttgacatcgtctaccctagagggttgttgtgagtggcgagctgatagaagtaaagtgcttaaaatagcgtctggcactgcaggagggaagacctcctctgggaatgaacttgtgggcctggcatggccaagggcatgcagtgggggggatggggaggcaagggacgcctgtgatggaggctgggctccagccatgctgtggcccgctgtgctttcctggcggggcgatcatgggcaaatgcctcagtgtccccgaatctcagcttccttattggtgggaggattcggtgagtggcttccctggtggaaagtggccttggccagagtagacatctgtggctggactgtatacagagccctgcccaagtcggacacagccccccaatctccagtgcactctgtctttttttttttttttttttttttttgagacagggtctcactctgtcgcccaggctggaatacagtggagcgatttctgctcattgcaacctccgcctcccaggttcaagtgattcttgtgcctcagcctcctgagtctctgggactataggcatgtgacaccatgcccggctaatttttgtgtttttagtagagacggggtttcaccatgttagccaggctggcctcgaactcctaacctcaagtggatctgcccgccttggtctcccaaagtgctgggattgcagacatgagccaccgtgcccgacctcagtcttggggagcagagagaaggcagacagagaaccccatctcctctgctggggaagtggtctagggagcaccttgaagagaatggcagctaaggagaggtaggggagaggctggcctggccagagagaggtgagctgcaaaggagggggacccaggggcctgcagggtgtctgtggtcagccctgctactctctgcctttcctggctggaatgctatccctggcctcccagcactctctgggttagaggctgcaggcggtcctgattagcacacatgggagcctcaccttgggaccttgtccagggaaccgtggttctccctccagtttcctcccattaaatggagggggctttcgaggattggcccacacccaacataggtgaatccttggtctcctgagcctgctatgtggcctggaagagaagatgtatcccaagttgtccaggtgtgggggtaggtaggacacagagtagccctgggaatcctgcccaagaccccctcgtccccagtgattgaggaggagtccctttccccggtgtagtttatctgtcccaggggccttctccggcaccctctggatctgcttcctgatctcactctggggaactgcttggggagcttcacgtttcagtctcaaggatcgcgcagggcggaccctcagcagcctccagatctgcccagaaagtccacggtgccggccctgccacttctttgtttggcttaagagacagggtcttgctgtgttcctcaggccggcgtgcagtggtgcgatcatagctcactgttagccttgaaatcctgggctcaagcaatcctcctgccttagcctcctgagtagctgggactacaggtatgcgccaccacggctggctaattttttaaaaaaattggctgggagtggtggctcacgcctgtaatcccagcactttgggaggctgaggcaggtgaatcacttgaggtcaggagttcaagaccagcctggccaacatggtgaaaccccatctctactaaaaatacaaaaattagctgggcgcggtggtgtgcgcctgtaatcccagctacttgggaggctgaggcaggagaatcacttgaacccaggaggcggaggttgcagtgagccaagatcatgccactgcactccggcctgggtgacagagcgagactctgtttttttttttttttttcgttttttgttttttgtttttttaattacgggccaggtgcagtggctcacacctgtaatcccagcactttgggaggccgaggtgggcggatcacttgaggtcaggagttcgagaccagcctgaccaatgtggagaccccttctctactaaaaacacaaaaattatccaggcatggtggcgcatgcctgtaatcccagttactctggaggctgaggcaggagaatctcttgaacccaggagatggaggttgtggtgaccacagatcacacaactgcactccagcctggtcaacaagagcaaaactccgtctcaaaaaaaaaaaaaaacaaaaagacatagagatgggctctctagtatgttgtccaggccggtctcaaactcctggacataagcagtcctcccctccttggcctcccaaagatctaggattacaggcctgagtcactgtgcccagcccaacctgccactttgacactacacagctctgacttttggttgaagaatctggagtccccagttgccccccctccccctgtgcttgcctttgttccccaaaaagcagttacatgaaggaaatggagaccaggcctaacccagggctgaaggagttgggtctggagattctaggcccctcctgtgtctcctctggtgttgattctctgcatcgcttctttattttattatttttttttgagactgagtcttgctctgtcccccaggctggagtgcagtagcgtgatctcagctcactgcaacctccgcctcccgggttcaagcgattctcctccctcagcctcccgagtagctgggatcatagacacgtgccaccacgcctgcctaatttttggatttttagtagagacggggtttcacccatgttggccaggttggtctcaaactcctgacctcaggtgatccaccagccttggcctcccaaagtgctgggattacagacgtgagccatcatgcctggccgcttatttattttaattgttgtttagtcagtacacacacatgcccaggccttagttctgtttgatgcttttgacaattatggacacccatgtcaccaccacccaaagccagacatggaacttgttcccctctgggtaggtttgttcagtgggacagcccctctttccctgtctgttcctctcatcatttgtcccctgctgccaggcggggcattcttgtaaacaggtccagactgggtttggggggctctgtgcccccccacccctgccaggagaacccccttttattcttcctttttgtctgtctctttaaagcgattcattagccttggcaggcgtgggtctgagctgttttcctttatgtcgttggcaggtctttctcccgctaattgtgttctcggagctggggttcatttttgccggatgtgttacacatgtgcaagcgtagtggttttatgtatagaaaacctgcccagcggtgtgggcatgggtgctactcctggcgaggactgcagaaaggcccctggccaatcagtgctctcgtgaaagagggatgctcttgttaaccatcccgggcagggggcatgtgaataaataatcaaagactggggtgcctcttgcagactgagggagggacattccagagaatttgctgcattcttccttgaacaggacgggaaggcgaagataggctggagcttccagatttccatcctgtgcccttgagggaccctctgcaggagcctggctctgcctttgagccctggagcccctagatgcaggatgatgggatgcctggctcttactcccgctcacacactccaagtctcgctatcaggacagccccccacagggagccacagcagccacagctcactccctcattttttttttttttttttttttttttgagacagggagtgcagcggtgtgaacacagctcattgcaacctcaacctcccaggttcagttcatgctcctgcctcagcctcccgagtagctgggacggcaggtggccccacacctggctaatttttttctttctttctttctttttttttttttttttgaaatggagtttcactcttgttgcccaggctggagtgcgatggtgtgatctcagctcaccacaacctccacctcctgggttcaagtgattgtcctgcctcagcctccccagtagctgggattacgggcatgcgccaccacgcccggctaattgtgtatttttagtagagacgggttttctccatgttggtcaggctggtttcgaactcctgacctcaggtgatccacccgcctcagcctcccagcctgtagctgggattacaggcgtgagccaccgtgcccggcctaatttttgtatttcttgtagagacggggtctcaaccatgttgcctaggatgctctccaactcctgggctcatgcagtcctcccacctcgaccacccaaagtgctgggattacaggcgtgagtcaccatgccccgccccctccctcatttttatcttttatctttttttttcttttttagagatgggggctgggtgcggtggctcacgcctgtaatcccagcactttgggaggctgaggcaggtggatcacaaggtcaggagttcaagaccagcctggccaagatggtgaaaccccatccctactaaaaaatacaaaaaaaatttagccgggtgcagtggcaggcacctgtaatctcagttactctggaggctgaggcaggagaatcacttgaacctgggcagcaggagttgcagcaagccgaggtcgctccactgcactccagcctggatgatagaatgagattccatctcaaaaaaaaaaaatggggtctcaatattttgcccacgctggtctcaaactcctggcttcaaatgatcctcttgcctcagcctctcaagtagctgggcctcctgcctcagcattctgaggagctgggcctcctgcctcggtgtcccgaggagctgggcctcctgcctcggtgtcctgaggagctgggactgcaggggggcaccaccatgcccagctcactccctaatttgtataagaggaaactgaggcactaaaactttggtggcagagttgggatgtgaacccaggtttggccctgatccgttcacttggccatcagccctgcagcccctcctgccacttttcccactctctgactcctccacagggcagtgcaaggccatggaggaagtgcctgcccaaggcttacccctgctgctcctggtccttgtcctgtgtcaccgtgttggccatagcgacctcttccagagctcgccaaagccagggtcccgtctcccctggttcctgccgtgtgcctgatttctttgtggcatcagtagtgtctgcccccttcgcctgtgccacatctggaatcacatctggcgaagcagcctgcaggtcctggggcggaaggcggccttcctaacccaaacatactgttctctgagccttggtggggccagaagggctcctggagcgccctgggacctggcagagggccttcctgcagctttgtggcccaggacatcctgtgtctctggctgatggtcaaaacctttccttattctttatttttttttaaatgttttactttttgtagaagcagggtcttgctttgtcacccaggctggtctcaaactcgtggtcccaagccatctctctgccttggcctcccaaagcactgggattacaggcatgtgccagcatgctctgactcagactctttcaagaggtgcactaggcagggacttcaagtgggcctcagccccagggcagcttctccctgacccaacttcgatttcctccattggaggctgcctccgctccagcctctctggagcgcccccctgtactcccctcctctgggtgaggcccttttgccagcctgaaggcaggccccagcccagcttgctgcactgagctctctgtccttggcaatgagagccagggtgtggagggtcccagtcgctctgggagatgatccccctcagcagcctggggtcttcttgccgctccatgacacgcctcattcagcccgaccttccaggccactgtgggtgtctcctctgcaaagggcctcctgctggcctagtccccatagagagctgcagcccagctcctgccatgtgtcacaatgtgacagaccctctttagcaccaggaagcaggcttgattgcctccttgtagtggtgaggctcaggggtcaactagcctggcctggcattgcccaggcccagagcacaggtagaacctggggtcccctgagcgtggcccccagtacctcccagctggctctctggaggctgggatggaatttggctgtctttggaccagcttctgggtccccagctgagccacctggagactgtcatcgctctgttgcttggtttcccctcttaaaaataggactaaggtcgacctggagggtggtttgagcactaaccgaggccctgcacagccaacacctaagagtgcttcctggggctccataaatcacagcttcaaagtcttggcccgcgggagaagaaagactgggcgagctggcccagcagacagcatgtggagcgagggggctggtgcaggccggttttgtggctttgcaccgcgcccccaccccctaccctccacaaccccatgcttttcataattatccactaagctcccgcgctttctggggctgtggaaccccagctcacatctgctgtctcttttgtagtgcacaaagccccaggcggtggcagctgattagcatggatgcaggagacatttgcatgtaatagctcccagtgaagggggtgccccgtctctttttcagaaaagccaagctctttgtcttggccttctattcttggggttgcccttcgcacaccccacaactgagcagactgtcacccacaggtcaggactacaggggaagctgtcgacccttgaaggtggagcttagggaccagaccttagagggagccccctactgagtgccccccaggcctctgactgaagaagcttcacagtgatttatgaggtttgggtgtcctcagttcagggggctttctccagagcccacctagatggggcacgcattgagtgctctgtctcctgagatctgacctggcagtctggggcagggggaaagggcagctgccccaagtagtgcttgggggcaccatggaggccttggcctacctgagatgccaacaggacacccacagacacctctgttccgtaggtggctgcctctcagccctgcccatacaccacccagtgtcctgtcactgcgcaatttgagaatttttttttttttttttgagacagagtctccctttgtcacccaggctggagtgcaatggtgcaatctcggctcactgcaacctccgcctccccagttcaaaggattcttctgcctcagcctcccaagtagctgggattacaggtgttcaccaccatgcccggctaatttttttttttttttttttgtatttttagtagagacggggtttctccaagttggccaggctggtctcgaactcctggcctcaggtgatccgcctgcctcagcctcccaaagtgctgggattacaggcgtgagctaccatgcctggcccagaattgtttattaccttctgtaatcctacattcttggggactcctgaagtagattcaacactttgactttgtgagttgccaatgcatttccaagcccggatccaaccgtggaccctggccttttgggccagcagaagaggtggctgttttttctcatgaaatatttttgaaggaatgaagacgaatgcagccaacacctgtgcacttcccaccctcattttaaggaaaccttgcccatggaatgaagccccccatccaatcccctccccagggaacagctttatactaactctggtggtcggcttttggaggggccataaatggcctgaaaagctaacctgtaacctgtaaagcttaaactttacaggtgggatgtaaatgttgaggcgggaggatcgcctaaggctgggagtttgagaccagcgtgggcaacatagcaagaccccatctctacagaaaaataaaaaattagccttccatggtggtgcatgcaagcctggggtcccaggtactcaggtggctgaggcaggtggattgcttgagcccaggagtttgagaccagcctgggcaacatagggagaccctgtctctacaaaaaatataaaaattaggtggtttttttgttttttgttttgtttgtttttttttttttttgagacagagtttcgctcttgttgtccaggctggagtgcagtggcgcgatcttggctcactgcaacctccgcctcccgggttcaagtgattctcctgtcttagcctcccaagtagctgggattacaggcgcccaccactacacctggctaatttttgtatttttagtagagatggggttttaccatgttggccagactggtttcaaactcctgacctcgggtgatccacctgcctcggcctcccaaagtgctgggattacaggtgtgagccaccccaccgcgcctagcctaaaaattagttttgtgtggtggtacatacctgtggtcccagctactttgttttatttacatatatatatgtatatgtatatacgtatatatgtgtatacgtatatacatatatacacacatatatacacacacatatatacacatgaatatatagacacatatatacacatgcatatacacacacacatatacacacacacatatatatatatatatatatatttttttttttttttttttttttttcttggtatagctctatccttcctgaagtcccagctccttaggaggcggaggtgggaggattgcttcttgagcacaggaggtcgaggctgcagtgtgctatgactgggcgggccattgcactccagcctgggtgacagagggagaccaaaactgagtcagtgttcccaagcagtgtgtgaagctgattctctgtcagccacgtgccagatgggttgggtcccaggggtggccacctgggggacagggccagacacttgttctgggcccaatatggccttgtgtccagaactctctcggtggctccttctctcgaccctttgccttgagccggagcactgtggggacacaggaaccaagactggtgttttgtgccaatgccacactactgtgtgcccgtgggtcttgggccgggcatgggtgggttcgtcctcatggctacacagtgaaccatgtgttattttatttttctagacactaaagctgaggtgtcgggaggtgatggtcccttgcttgcaggtggcagagctcaggttcaaacctggatcttactgcacctggctcgtttgggaggcctcccttgctggaatgcaggtcagggagccccgatgcccttgggctgactgccccacgtccatcacacccactgagggccgtggggtgggtgcagggcttgttctgggagattccaagctgaggaaagcagggctgtccgccagcctccagctgggtcacagaagaggctcagggcctgttcccactcccctcccccagccagcagggtccaaaaggatgttgggggggtggtccccagtccggcctgcccactctagggaggggcccagataacttgcgtagacgccggccctcccgcccccagccttcgccattgccttttgtctggctatctttcatgtacaagggagaaattcaagccactcaggagggtgtaacatgaaaagtcagtctctccttctctccgcactgcccgtgacctgtggtttctcaggcacatacaagcgcgcacgcataaatctctcctccaacctgctgggcttcaagttatgcacgttcacacaatggcaaaggagggtgcggattgaaaagtatgacttgcttcccggaggcagcactgaagtcactttattgtgtttccagacaagccccatgaatgcagtgtgcactgcccctcctccctctgtcccttccccgcccatctgtacacctgtggtgcgtaggttttacaccactctgtgccttacgttgtggctcgatcatttaacatgtcagtgtgtaccgatggaaattgatctcttttaatttgccacatcttcatttattcattctttgattaattgatggatatttaggttttctgctttgggggcattcagatccaggtgtatctctgcaagtagagcttgtagcatacataaggccctgcaaagggatttctgggccggaagtttttgatcagttgctcagacatagttctgatgtgctggggaagtgcccgttcagggccatggctgcagggctcctggacacccagctccggtgctggagtggggttgggattcgcccagaggccagggctgcgccagaggagcccagggtgacctcatggtcctcagatacccggggctgggcagcacagtggaacagctgctccagagcttctccgaggacgacatcggaggatccgactcaggttacggcaggagagggaggccaggccgggttagggttctggggtttgggattctcttccgaggctggcattgatctgttgctgatgatggtaacagcagctgctcttgtttatgaagtacttaacacctccagctccctccattacctaggaatcctcactgcagggaggggttttcatccccattttgtgcctattttatttatattattttattttttgaggcagggttttgctcttgttgcccaggctggagtgctatggcacgatttctgctcactgcaacctctgcctcctgggttgaagtgattctgctgcctcagcctcttgagtagctgggattacaggtgcccgccaccatgtctggctaattttttgtatttttcggtaaagatggggtttcaccatgttggccaggctggtctcaaactcctgacctcaggtgatccacccgcctcagcctcccaaagtggtgggattacaggcgtgagccaacactcccggccctgcccattttatttatttatttttatttttatttttttcagatggagctttgctctttttgcccaggttggagtggaatgcaacctctgcctcccaggttcaagtgattctcctgccttagcctcccgagttgctgggattacaggcatgtaccaccatgcctggctaattttatattttgagtagagacggggtttcaccatgttggccaggctggtctcgagctcctgacctcacatgatccacctgcttcggcctcccatagtgctgggattacaggcgtgagccactgcccccactgtgcctattttatttcattttgagacagagtcttactctctcccccaggttggagtgcagtggtgcgatctcggctcactgcaacctccacctcctggcttcaagtgattctcctgcctcagcctcctgagtagctgggactacaggcacccgctaccacgcccggctaattttttttatttttagtagagataggttttcaccgtgttagccaggatggtctcgatctcctgaccttgtgacccgcctgccttggcctcccaaagggctgagattacaggcgtgagccaccgccccctgtcattgtgcccattttatagatggggctcctgaggccaggggtgaaggcaggtgctagttcgggggatccaagccctgccagactctgctgcatgtgggctctgacctagtgaagttccaggatggtgccctggggccgggctgtcaggccctccacgtgggttatgtcacctcaccctttgggatgtgtcagggtggtggttgaacagatgaggaagccaaggccagggctggagaacagtgggttcggccctgaacccagtccctccttgataaacctaagtcctccttgatgccaaagcccatcctttcagccatctccctgctgggtgaccctagggtcatctctgccgcctcttgggcacatgggtgccaagccacacaggaatggggggaagcttctggttcccagtttggaaacaaggtcacctctgccagggcagtggggcctggctcaggtgtcgcctcctcccgagtctgcctggaatctgaattgggcctggtccgcatgcatcagcttccgtgctttccctcctctcagcgcttactgccagttcctgttgtccgtctcctcactgccctgctgggtgctgtctgcctcccactgtggactcccagcatgggagggccgggggtggctctctggttcaccgccaggtcctctgtgcctgcatgtggtccgggcagagcaggctgagcagagatgccagctgagtgggcttcagaaagcgtgtttttttttccgtgcctgtgggatgggagttggccacggggggtcggggtgtctccctctttttacctaactctcctcctttgatcgggaatattttcctctggaaggtgaagagcccatgttgtctttggcagcaggaggcgatttaatacaagacgtaccatttggacaacggcttctacagctaccagctactcccccgccccaggtttgccgagataaatagctttaattattcctccatttggtggctacagttgtgttccccctggagatgcaagagcttgaaatgtggcctttctcccccgagctgctgctgcttttcttcttgccctccacctccttgtgttttttttttttttctctctctctctttttttttttcttcttgaaatggggtctcactctgtcgcccaggctggagtgcagtggcacgatctcagctcactgcagccttgacctcccaggctcaagggattttcctgccacaacttcccacatggttgggactacaggtgcgcatcaccatgcccagctaatttttttattattatttgtagaagatggggtctcactgtgttacccaggctggtctcaaactcctgggctcaagtgatcctccccgctcagctttccaaagtgttaggattacaggcgggagccactgttcccagccggcctccttattctctatctgccaaagaatgtggccctgatgtcacgacagcatgggaggttctctttttttttctttttgagagagtctcgctctatcacccaggctggagggcagtggcgtgatttctgctcactgcaacctccgcctcccaggttcaaattattctcgtgcctcagcctcccaagtagctgggattacaggtgcccaccaccactcctggctgatttttgtatttttggtagagatgaggtttcaccatgttggccggactagtctcaaactcctggcctcaagcgatccacgtgccttggcctcccaaagtgctgggattacaggcgcaagccactgtgcctggcctagggatgggaggtttgaagggactccaggtccccctgacccaggtctaacgagcctcaagggcccaaagaccccctgcttgttccgttgctttctggaagcaagggggaggggaaggaggtgaacaaatagtgctgctgtgtggccacctgatgctaaacatctctgcgtggtgaagccacttccccaatcaaggccatgcgcacagtgagggcaggctagcactccaacttggacacctagacccctgaacccactgccccctgtgcttagggaagaggctgggctgcccctgcccctatcccggggagggcattctggtcagtacccatgagtgccccttgtgtgctaggtactgtgtgggtcatgcccagagccctggatctgcgctttgtggggctgtcaggtaggcattaaataatgagctgccaggcagtgagggcttgtccgggaaatgctggaggacctctaggaggaggtgacaaggaagcaggggaagaggggagggtgatctctaaggagcatcagaggccagagagaacctctgcccatgatcttgaccgggagagagtgttgaaggccagcgaggtttggctggagtgacccagggggcagcagtgagactgcagacattggcagggggctggttccggaaggtgctggggaaccgtggggcggtgtgaagcaggcgggttgtgttagacactgtgcggcttgaagggtggactgggaggtgactgaggcatggtatgtcgcccggcaccatctgctcagtgagacccttgagagacgtctccccgttcttccaagaccctcctgcatgctgggacccagggctgccgtggagctgcttgctgccccacccaccattctctagtgtattttcttcaagtctggggctagggaatccttataccttagagtcccccagattctgctgccctggggggccaataaggaggggatgtgcagcatgctgactctaaggcaggtggggaacagcagccagtccaccaagagctgccctcttccccatccccattgcctcctgcctggccagccatagcacttggctccttccctatcctgtgtgacggtgggtctctccccaccctgcgcaagatccctcccagtgctgcccagagccaagccaccagtccactggggcctcttgcagtccctccacagcgcccctacccacatcaacccacgtttcttggaggtctgtcccagtagcctcccagggctcaccacactgtctgggccacccctgtttccctgcgttcctgcactcttccccttactggcatatctgtccccagtctccttcccaggctgggtcaggtgccacctccaggcacctacagagtccaccacttggggatctctgtcagtctgccactcggctgtcctcaccgcctctaggatggggagtgtgtctccattgccgagtgcctagtgagcagatagggaagtgggtggcgaggatgctgagggtccagcctctgctctgcacctgtaatccttccgggttttgcaaatgaagctttatgggcacacagccatgctcatttgtttacatattgtctgctgcaaggcagaatagaatcattgtagcagagatcagattccccagcagagatcagattccccaggaagcacacaatatttactgtctggtcctttacacagaaagtcagccaaggcctgctctaggaagcgcagagacattgggtggtgcattggtgaggaatagggatgctggtgccagtcacctcggccactcttgctgtgtgaccttgagcaagacacttaacctctctgagcaaataagggcatagtgagagtagatactcccagaagtgatgagaagaggaaacaggaggtcgacataaggcaccggaacagagcctggctgttagagtgttgtcactcttatgtcatgtgacatcccagcctctgcagggtgtgggcaggcctggctcatggcagctgggggtttgtgacctggattcacatggtggagggctgcttcctgggaagcaagaaaggctgcctcaaagatggggcaatttttctacccccttccctgcagttccagcccctcctcccttggccccagagcttcatcagggccgactgcagtgtggcaggccagcgagtagccccaggctgggtccaggggtggccaaagcgtaacactcagtccgggtttgtgttctttacgttccccgttggagactccacctggagatcccagtccctttccttttactgcagggtaaagaaatgctagctctgggccgggcacggtggctcacaccggtgatctcagcactttgggaggtcgaggtgggtgaatcacctgagatcaggagtttgagatcagcctggtcaacgaggtgaaaccctgtctctaggctggatgcggtggctcactcctgtaatcccagcactttgggaggctgaggcaggcggatcacgaggtcaggagatcgagaccatcctggctaacacggtgaaaccccgtctctacaaaaaatacaaaaaaaattagccgggcgaggtggcgggcgcctgtagtcccagctactcgggaggctgaggcaggagaatggcgtgaaccccagggagtggagcctgcagtgagccaagattgcgccactgcactccagcctgggagacagcgagactccgtctcaaaaaaaagaaaaaaaaaaaaagaaaccctgtctctaataaaaatacaaaaattagccaggtgtggtggtgcatgcctgtaatcccagctactcgggaggctgagacaggagaatcgctggaacctgggagatggaggttacggtgagctgagattttgccactgcactccagtctaggcgacagagtgagacttagtctcaaaaaaaaaagataccccagctgtggcctggcctcaattggcctgaactcaccacggcctcctggctctagagtctgctttttggtcacccttgcctgctagccctgcagcctgtcccccacctctccaggccatgtgcacacagtccccaacatgcgccggctgatgccgcaacagtggtgctttttggatttgtctctagaggccaacacagagggcctttctgaatcctggggtcctgcccccttccgcggctcccatactgctcctccccagctgaatggccgctttgggaggtggttgctggccttgagaggatgccacagtgagtttcctgcgggcagggctgcatctgtggcgagcactgaatcgccactgctggatccagatgcctgtgcgtcccgggccccaaggctcccttctaccctcctcctggggtgctgttcgcaagccaggagacaggctgtgcattccctgcctactcagaggtgaccctgggccaggtgtgcgatggcccactggacccatagtagcagagggaggggagaggaagggagaaagtgggaacagcatgtgcagaggcctggggcctggcccatgtagggactagagggttgagtgtgtccatggggaggggccaagacggggagagccatgaggaatgatgggcacagagctcagaggctcgggagtctcctgaacaaagagaggaacacggcttagcttgttttttttttttttttttttggtttgtcagtatttcccaggtgtcttctgtgtgccagggactaacttggggataaagctgtgactttgagaagctgccggctccgcgggctttagcagctgctgctgtgatgaagcgatccacttgccctcagccccggcatctttggcccaagcccagccctagccctggctgggcacagccaggcttcacttggccacaggtcctgtagttgcctgcctggcgccaggtcagagagggacgcctcaggcaacatcgggttgccaggctgcttggtaaacaggcctccctgggcccacttgctgtcgcccaggtgtggctaacagatcgacagtatctcctgccccaggacgggtatgagtgtgggcaccatgccaaggttggatgtcccttcctgggacccacccacagctgggagcactttatcttgggcctctgtgggtgtagtgaggctgtgagtctggggcagtggcctgctgacaccctcctggcagggctcaggaggttcctccatgccctgccctcaggagggcggcacctggctcctggggtgggagagagtctggcaggactggctgggtgtggccggggagctgcccttcaggtctcatatctgtaggccctcatacctggactcgtcagttaggaacagttttctttttctttttctttttttttttttttgagacggagtctcactctgtcgtccaggctggagtgcagtggtgccatctcggctcactgcaacctccacctcccgggttcaagcgattctcctgcctcagcctcctgagtagctgggattacaggcacccgccatcatgccttgctaatttttgtatttttagtaaagacggggttttgccatgttggacaggtgtgtctcaaactcctgggttcaagtgatccgcccacctcccaaagtgctggaattacaggcgtgagccaccacgcctggcccatttttcattttctattgaaacaaaattcacacctgtaatcccagcactttggaggccaaggtgagaggatcacttgagccccaggagtttcagactagcctgggcaacatagtgagaccctcatttctacaaaaaaataaacaaaattagccaggggtggtggcatgtgcgtgaggttccagctacccgggaggctgaggtgggaggatgtcttgagcctgggaggtcaagagctgttgtttcataacatgaaattagcccttttacaatgttgcataacaatcacctctatctactcccaaaatatgtttgtcaccccaaaaggagaccccacatccattaagcagttgctccccattcctgccttctcccagctctcagccaccagcagtgtgccttctgtgactatttcatataaatagaatcatttgtgtctggcttctttcggcatgatgtttctgctattcattcatgttgcagcatggctcagtgcttcctttatttttatggctgaataatgtttcattttatagataagccatatttgtttatctgtttgtcagtttatggacatttgggttgtatttctatcttgtgtctgtcgtgaataagtactgctgtgaatgcttgcatacgagtgtctgttggttttttttgctttgttttgtttttatttttatttttttgagatgagtctggctctgtcgcccaggctggggtgcagtggcgtgatctcggctcaccgcaagctccgcctcccaggttcctgccattctcctgcctcagcctcccgagtagctgggactacaggcacccgtcaccacacccggctaattttttgtatttttagtagagacggggtttcaccgtgttagccaggatggtctcgatctcctgaccttgtgatccacccgcctcggccccccaaagtgctgggattacaggtgtgagccactgcacccggactttttttttttttttctgaagcggagtctcactctgttgcccaagctaaagtgcagtggcgctatctcagctcactgcaacctccacctccctgattcaagcaattctccctgtctcagcttcctgagtagctgggactacaggcacccaccatcatgtctggctaatttttgtgtttttagtagagacggcattttgccatgttgaccaggctggtcttgaactcctgacctcaggtgatctgcctgcctcggcctcccaaagtgctgggattacaggcatgagccactgcacttggccagctttttgtttgtttgtttgtttttgtttttgtttttttaaagaggtggagtcttgctatgttgcccaggctggagtgcagtggctgttcacaggcagtcatagctaactgcaaccttgagctcccgggctcaagcaatccttccacctcagcctcccgagtagctgggatctcaggcatgcaccaccatgcccggctaattttgtttatttttttgtagcgatagagatggggtcttactatgttgcccaggctgaccttgaactcctggcctcaagttatcctcccatcttggcctcccaaagtgctgggattacaggcatgagcctgtgcctggccctggctatctctttgttgttgagttaaaaaagttcttggcccagcccagtggctcatgcctgtaatcccagcactttgagatgccgaggcggacagatcacacgaggctaggacttcaaaaccagcctggccaacatgacaaaaccccgtctctaccaaaaatacagaaattactgggtgtgatgatgcatgtctgtaatcccagctactcaggaggctgaggcataagaatcgcttgaacgcagctactcaggaggcagaggttgcagtgagccaagatagtgctgctgcactccagcctgggcaacagatcaagaatctgtctcaagaaaatatataggccgggcacagtggctcacctctgtaatcccagcactttgggacgccgaggcagacagagcgcttgagctcaggagctcaagaccagcctgaccaacatggtgaaactccatctctacgaaaactacaaaaataagctggacgtggtggtgcacacctgtagtcccccagctactcgggaggctgaggcaggagaatccctagaatctgggaggcagaggtcacagcaagccaaaattgtgccactgcattccaggctgggtgatggagtgagactccatctcaaaaaataaatataataaaaatagatacaaaataattgttgtttctttttttttttttttttttttgagacggagtcttactctgttgcccaggctggagtacagtggtgtgatcttggctcactgcaagctccacctcccgggttcacaccattctcctgcctcagcctcctgagtagctgggactataggcacttgccactatgcccagctaattttgttttgttttgttttgttgtatttttagtagacacagggtttcactgtgttagccagcatggtcttgatctcctgacctcgtgatccacccatcttgccctcccaaagtgctgggattacaggcgtgagccactgtgcccagactttttttttttttttttgagacatgctcttattcttgtcacccaggctagagtgcagcgttgccatctctgctcactgcagtgtcaacttcctgggctcaggtgattctcccacctcagcctcccaagtaattgggactacaggcgcatgccactacaccgactaatatttttatatttttagtagagacgggatttcaccatgttgcccaggctggtctcaaactcctgggttctagtaatctgcctgactcccaaagtactgggattacaggtgtcagccaccatgcctgaccctaaaatagttttttatatattctggacactaaatacttaacaatagatgatttgcaaatagttctcctaagagttttcttgttttagctcttatatttaggtcattgctccatttgagttctgttttgtttgtatatggtgtgaggtaggggtttaacttcattcttttctctgtggttatccagttttctcaacagtgtttgttgaagacactattctttccccattgaatgttcttggcatccttatcaaaaatcaattgaggataagtataagggtttatttctggactctgattctgttccattgatctgtgtctcctttcttttgccagtaccactacactgttttcattactgtaccttcgtagtaaaatttgaaattgagacatgggaatcctccaacttcattctttttcaagactgttttggctattcagggtgattgagaacactttgccatatttgcactcatgttgttgttgttatgatgggctattcaaaagcaagctactgacatcatgggaatttgccataaatacttccgcatatgttttctaagaaaatatgcatttctctacaaaaccacaataccattgtcacatccaaataacttaaaattatggaatatgtagtccacactcacatttccctagttgtctttttttttttttttaataggatctcacgtctgttgcctagactagagtgcagtggcaccatcatacctcactacagcctcaacctcctgggctcaagcgatcctcccacctcagcctcccaagtagctaggaccacaggtgtgagccactctgtccagctccccagttgtcctttatttatttttttgagacaaggtcttgctctgtcacccaggctggaatgcagtggcacagtcatgactcactgtagcctcagcctcctgagtccctaagacaacaggcgcatgccaccatgcctgcctaatttttaaatttttttgtagagatggggtcttgctatgctgcccaggctgatctccagctcctgggttcaagtgatcctcctgccttggcctcccaaagtgctgggattagaggtgtgggcccagcctccccagttgtcctgtataacttttaaaaacatttttcgtttggctccagcccagggtcccactttgcattgcattgggcactcccctctttcttgtctcctgcactctggaatagctcccaccgttttggtctttcctgacattggcctgttcaaggagaccaggctggttgtcctgtagcctgccccacaacttgtccttttctgttgtcccttgaagatgagactagggcaaacatttttgccaagaatactacagatgatgcacctgtcccactgcagtatggcaggcaggggcacagtgcctgattgggctggcccgttcctggcatcgctaagtttcaccatttggctggagtggagtggctgcaggtttgtggaatgaatgactggtaacagctatcatgatgggtacagggagacagtgtcctaattcactagaccactgccccgccattagccccatctgatggtgagaaccccagttccagagaggctgagggacatgcctgtgtcacagtgaacaaatggcatggatggggtgtgaacccagcggtctgactccactggccacatgcagtcactgctctgcgcccatccaagaacagaagggctcagccgagcagggcagaggcagctccagctctgagttcctgtgggccagcaccatgccttgtggccctgtctgcccacctcagccttcaccatgcccgtctcagccctgatcatcctgaggacacaggctgtgttcctgctgtctgatcagtcgctcccttgtcttccatgtgggctgggcagtcagggcacccggcaatgctgccagggtggttttgtggcactctggaagaatctgggggcaccaaggggaggcagcaggagggcgacagggacccaggctcaaaagaaggcagctgacagggctgcaccgctcacgccagcctgtcttctctcgtagatgaagatgtgtgtgtctttaagtgctcagtgtcccgagagacagagtgcagccgtgtgggcaagcagtccttcatcatcaccctgggctgcaacagcgtcctcatccagttcgccacacccaacggtacgtggccctccttccattccggtgacaccagcccaaagcgcccagagccctggtgggcaggggcgtagagcctggctgaggggtggcccgtgcatccttaagaaggctccactgccctcaaaaccacattcccacatgcaggtatgcccagaatacactctggcctgggcagaccctggatcccagaccctccctcaccggctcctccgggtcttttggggcttggcttctatgtccccacctccaagaggcccatcctgaccacctgggaccagtctttctggcagtggccagccctgggccagctgtgactgggccagctgtggatggagtgaggcgaggtcctagaggcaggaagagtttgctcagggcgcagagaagccaccagaagggcttaaccaacccaccttgggggcacaggtggacacaagattcctgactaggggtgggagaaccccaggtggatgcagccagggtagcagagaggtgtccaggaatgcccagggctggagatggtctgaaggtcccaccgcaggcttggttaccagagacctgaagtgagtccagtggttgacacaggtgctggtgcgaggacagctggaggtggagaggctgcgtgcccatgagccactgccggcctcccccttgtctcaaggtagctgtgcagtgacccagatgtaccttgggcagcctgagccctcggggccagctgtgtgaagctgccatgcctggctaattttttgtagagatgggttttcactgtgttgcccaggctggtcttgaactcctggcctcaagtgagccacctgcctcagcctcccaaagtgctgggattacagatgtgagccaccgtgcccggccccttttttttttttttttttttttttgagaaagagtgtcactctgttgcccaggctggagttcagtggtgctatcttagctcactgcaacctccacctcccgggttcaaggcgattcttatgcctcagcctcccgcgtagctgggactacacgtgtgtgccaccgtgcctggctaatttttgtgtttttaatatagtagacatggagtttttcatattgcccaggctggtctcaaactcctggcctcaagtgatccacccgcctcagcctcccaacgtgctgggattacaggcatgagccactgcacccggccgttcccactcttaagactatttgtattttaatattttttatttcagttctgtcagtttttaaaagttgtgctaaaatctacataacaaaatgtgatcattttaacccttttgaagtgtgtaggttggtagcaagcagcacattaacattgttgtgcaactgtcactaccgcccatctccagaacttgctcatcccgaactgtgtcttttcattgtttttgagacggagtctcgctctgtcacccaggctggagtgctggagtgcagtggcgcgatctcggctcaccgcaacctccatctcccaggttcaagcgattctcctgcctcagcgccctgagtagccgggattacaggcacgtgccactgtacccagataattttttgtatttttagtagagacgggggtttcaccatgttggccaggctggtcttgaactcctgacctcaggtaatccgcctgcctccgcctcccaaagtgctaggattacatgcgtgagcaaccatgcctgaccgtgtcttttaatttttaaagagattgtcttttaaatattgttttgttttttacttgatataatttagtggctattattctatgttaataaatatagctttattttattttattttattttattttattttattttattttattttattttattttattttgagacagagtctcactctgttgcccaggctggagtgcagtcacacaatcttggctcactgcaacctccacctcccgggttcaagtgattctcccacctcagcctcctgagtagctgggattacaggtgcccgccaccacccctggctaatttctgtatttttaatagagacagggtttcaccatgttggccaggctggtctcgaactcctgacctcaagtgatccactcgcctcagcctcccaaagtgctaggattacaggcataagccaccgtgcccggcttattatttcttgtagagacagggtcttgctatgttgcccaggctggcctcttaaactgggctcaagcagtccacccgcctcagcctcccaatgtgctgggattacagttgagaaccactgtccccagccaaatagatagagcctgctttaaagggccacataccattgcatctctgggaagggtggtgattggtgattctctgccatgcttttcttaattttttatttcatgtttttgtttttgttttttaacgaggcagggtcttgttatgttgctcaggctggtctggaactcctgacagctgatctgcccacctcagcctcccacctcagcctcccaaagtgctgggattacaggcatgagccactgcacctggcctctactgtgcttttctgtgcccctggcatttgtccagtcccctcttactggacattgcagtgtctgctgcccccacacagatgctgccctgagcttctgggtggacttgggcttatttgccagagctttgactcctgggccggtgggcgtgtgcttgagagagcttcaccaagctgccctttggtgaggaatccccaggcccactcccaccagacagcagccccacatgcaggctacctgccctcttctcatgtcagtcaccacagtgcaggcatggctgcccttcatcttttctttgaactttgaaaattgtttttcggggaagagaaatcaccagccctgtatgttcaagggagaaacgtcaggacatacggccatccagaaccttccctcccagatggccacatgctgggttgctgaccgccccccggtgacttggcttccctgttccagatttctgttccttctacaacatcctgaaaacctgccggggccacaccctggagcggtctgtgttcagcgagcggacggaggagtcttctgccgtgcagtacttccaggtgggttgtactccccctcagccaggccgcctccccccggcagcccccctgccactcacccgcaggaggccacacagcacagggaaggcccacccaagttcccgtcctggctctgtcccttactggccatgtagccttgggcaggtttcctctgctggctgggcctcagtttcctcatctgtgaagcggagatgcaggtgcctgcctgagagggttgctggaaggatctgagcacaggtggagctcagggccacaggcgttgtgaataacggtagagcagttacaatgccctgagcgctccctgcatgccaggccctggtctaagcgctgtcacatgcacagaagcacttggaccctcccaacaacgctaggaggtaagtgctattattgtccccattttacagatgagaaaactgaggctcagagaggttaagtgacttgctccaagtcacacagctatatgcaacagagccaagatgggaagccaggtctgcctgatgccaaagtctgtgcccctgcccaggtgccacgctgcctcccgatcgcccgttgtcttacagagagacaccacacctcacctgcctggcgctctgagttctagggctctgttcgatctgcttctcttcttctttggggccctcaagatgaggcaggtggcccccgatgccagaaccctgcctgtggcaaatcttgagttctcctgggcggcttccaggtccaggcggcatcagctgttgccatcggctgcagtgatagtggcggtgtcctcctgggggctgccctccggcttcctgctccctctcctggagctgctagtggggcccaggcagagggtgcacgacctcccgagggaggtttgtgccctagatggccccttgctctatcacagggctggccagggccttggctgcctcgtgccaccatgtgccccgtgccatcggtatgtctctgttccagttttatggctacctgtcccagcagcagaacatgatgcaggactacgtgcggacaggcacctaccagcgcgccatcctgcaaaaccacaccgacttcaaggacaaggtgagtggcccgcgcatgtgcccacctctctgcttctgtctcggttttttttttctttgctcattgattttatctttaattttctcagattagaaatgcatttatctcagttactgcagaggctgaggcaggaggatcgcttcagtccatgagtttgaggctgcagtaagctatgattctgccactgcactccagcctgggcgacagagcgagactcttgtctcttaaaaaaaaacaaataaacaaggccaggcgcggtggctcacgcctgtaatcccagcactttgggacgcccaggcgggcgggtcacaaggtcaggagatcgagaccatcctggctaacacgatgaaaccccgtctctactaaaaaatacaaaaaaattagttgggcgtggtggtgggcgcctgtagtcccagctactcaggaggctgaggcaggtgaatggcatgaacgcaggaggcagagcttgcagtgagctgagatcgcgccactgcactgcagcctgggcaacagagtgagactccatctcaaaaaacaaacaaacaaacaaaaaaaacaaaaagcaagaaaaacaaatgcatttgatatataaactcaacacagcatgtacattataggcttgagaggcctctatcagttccctccaagatagccgctacccctcagtatgaggtctcttcttcaagatttttccccatacagacatcagcgtatattttacaattattttattgagctgggcagagtagctcacacctgtctgtaatcccagcactttgggaggccaaggcagggggatcatttgagcccaggaagttgaaactgcggtgagctgtgattggggtactgctctccaggctgagccaaagtgcgagaccctgcctcaaaaacaaaataaataagctttttgatatcaccaaataatgtgcactcatgattaaagagagagagaacagagcagaacgtctgtattcaaaagtagaaatcggccaggcacagtggctcacacctgtaatcccagcactttgggaggctgaggcaggtggatcacttgaggttagcagttcgagaccaccctggccaacatggcaaaagcccatttctactaaaataaaatacaaaaattagctgggcgtggtggcaggcacctgtagtcccagctactcaggaggctgaggcaggagaatcacttgaacctgggaggcggaggttgcagtgagccgagattgtgccactgcactccagcctgggcaagagagcaagactccgtcttaaaaaaaaaaagtagaaatgtataatgtattcccttctcatcccatttgccagagtttttggtgtctaccttttttatttttttatttttacttttttttttatgagatggagtcttgctttgttaccaggctggagtgcagtgacacaatctcggctcactgcaacctccgcctcccgggttcaagcaattctcctgcctcagcctcctgagtagctgggactacaggcgcacaccaccaagcccagcagatttttgtatttttggtagagacagggtttcaccatgttggccaggatggtctagatctcttgacctcatgatccacccacctcagcctcccaaagtgcttggattacaggcatgagccactgcacccggcttactcagaatttttgttttctctttctgtttttggggggttttttgagacagattctcactctgtcacccaggctggaatgcagtggcacaatctcagctcactgcagcctctgcctcctgggttcaagcgatttttgtgcctcagccggccaagtagctgggattacagtcatgtgccaccatgcccggctaatttttgtatttttagtagagatggggttctgccatgttgcccaggctggtctcaaacttctggcctcaagcagttcatccgcctcagcctcccaaagtgctgagattacaggtgtgagccgccgcacctggcctgttttctcttttgaatcaaatgggagcctgtttttttcctccaagtattttggggatctctccacgtggatctgcatggatctgcctcatccagcgcctgggtcacgcccccctagcatcgcttaccgtcccagaggatggtaggccttgggccctggggaggagttgtcttgacacaagagtgtctgccctggcagggccatcccgagcctcctcctggccactgaggtctgggaaggacgtcctccgttggtgaagtcccttcctgctccccaaggatggagatccatttcctggttcatctggagctctgatcagtaccctgaggccttcccacctgaccccagcttcccctgcaggcactcaccatgcccagagcatttgtccttcaaaagctcatgcctgtcaccaccaggaatgtctgtccttggtctgctcgtgtggaagcaatcccacaaatccagaacaggtggtgtgttctcccagaccctggcctggactctgccatgagtgaccaccacgggccagtagccctgcggggagcccagccggccccagggcttgggcggctcacctgccccagccaagacgggctgcttctccaggcatgagtcagcatggagctgggagacactgccaccaacaactcgggcccctttcctccatgctagaactgcggaggccccggaaaaatgcttttcaactgccagtgagcttccaggggaggcccgtgccactcaccccagacgatccggaggcctgcaggccacagggttggggccgagcgggagcttccccagggcttctcctcccggaggactggcccatggctcatcttgagttctcgcttcattttgaccaagagcccataaagggcaaacattgagagtgaagacagacgcctcatgatgtgcacatcccttatgatcactgtcacctccccatcaccgtcgcctcctatgtctcgctctcacctcccactcctccctcagatcgttcttgatgttggctgtggctctgggatcctgtcgttttttgccgcccaagctggagcacggaaaatctacgcggtggaggccagcaccatggcccagcacgctgaggtcagtggcccgctggtgcccacccagcctcgtcctcgcccatgagtgccatgccggccccagcctagagaagcttgggaacccccaggggcctggggacattacttctgtgctttggtctctttattgtccccaagacagtcatttcagggaggggcttcagggcctgagatgattttctctcatggccggtagtcagggccacatgtcatttccctgttttcttttttttttttttgcactgaaaccttcattcacaaagttcaaaacataaaagctaaaaaagagcagacagcgtgctctccttccccaccccagctcccacccccagccccatcatgagagaggagctacggccacaaagtctgagcagagctattccgtgagcgtcctctcgcaccagtggaggctgcaccctccattccctgctctgcctctcccatggatctggggtcgccggggtcgtggaggggccatctttgttctgtcttgccgccgcagagcacccctgtgcccagccgtgccgctgttgctttagctgcattgtgtccgcagcgacactcagactccttccaggtcttcacgtggccaacgctgctgtcctgagcccctctcccacatgcggttgtgtctgtaggacacaccctagccctggaatcgctgggttgggggtgcatccagctttagctttggtggctgttgtgatgtctgctcgtccccctctttgcagccaccagcagttgtcgacgcagggtgggggacctaggaggccgcagcaggggacggccctgaggcagggccggggtcacagtgaactctctttttttttggggggggtctcactctgttgctcaggcttgagtgcagtggtgcgatcctggctcattgcaacctccacctcccgggttcaagtgattctcctgtctcaggctcctgaatagctgggatccaccactgcaactggctaatttttgtatttttaggccaggcatggtggctcacacctgtaatcccagcactttgggaggcttaggtgggcggatcacctgaggtcaagagttcgagaccagcctgaccaacgtggcaaaaccccattagccaggcgtggtggtgggtgcctgtagtcccagctactcgggaggctgaggtgggagaatcgctagaacccgggaggcagaggttgcagtgagccgagatggcgccactaccacctccagcctgggcaacagagtgagaatctgtctcaaagaaaaaaaaaatagttttttttttttggtatttttagtagagacagggtttctccatgttggtcaggctagtctcccaacttatgaggtcaagcagtccgcctgcctcggcctcccaaagtgctgggattacaggcatgaggcaccgtgcccggcccacagtgagctcttaacaggctatggccaatcgcagccatggttggggcgccagcgaagcaggcagaggggcacccaatgcccatgtgtggatggaggctgtcccttgagagcaggtctagggagggccccatggcaggaagacgcagggaagcccacatggccctgcccgcctgcaggtcttggtgaagagtaacaacctgacggaccgcatcgtggtcatcccgggcaaggtggaggaggtgtcactccccgagcaggtggacatcatcatctcggagcccatgggctacatgctcttcaacgagcgcatgctggagagctacctccacgccaagaagtacctgaagcccagcggtgagcactggggggtacacaggccaggcccctcggtggaggccctggctgccgctgagccaggccatcagtgcttcagctccctgcttactgtcggtggcccggggtgtagggaagcctgggcttttcccccgctcccaccccaaccccactccagccagctgtggcttttggagccctgggccccaaacacggccagacacccagctgcccactcgcccagacagggtacacaggatctcctggcacctctgccgtcccatgtcctgctcctgcgggacagcctctggctgggagtggggattgggacaggttctgtggtcagcagttccccaacaagccctgctctcctcacagtccaggaggtggggtgggcgagcatgtgtgcaaatgcaggggtgtgggtgcgagtgtacgtgtgtgaggaggtgaggtagctgtctggcaagcccatctgtcacttcccatccgtgcctctgggtatggcctctggtcactgggtgactgtttctttttttgagacagagtttcactcttgttgccaaggctggagtgcagtggtgcgatctcggctcactgcaacctgcacctccccagttcaagcaatttttgtgcttcagcctcctgagtagctgggattacaggtgtgcaccaccacgcccagctaagttttgtatttttagtagagatggggtttcaccgtgttggtcaggctggtcacgaactcctgacctcaggtgatctacccgcctcagcctcccaaagtgttgggattataggcatgagccactgtgcctggcctgggtgactgtttctatttgcccatctgtcttggggtctgtgcagccctgacgcctgaggcatgtgcctgtggctcttctcatgctaggtatgtgagcgtctgagcatttctgtacaggcaagcagctgtgtgtgcgtgtggcagggtacaggtccccagccagggtagcagccatgggatggagcgtgggcagcagcaggctggtggggcttgtgcaggcaggggcaggggggaagcttccactctcatctctggcccgccctggatccaggccctagggtcctggctggctgtgctcctggaggtgggaggtggcgtcccacagctgtgtctcatgtcttgggtgtgagtatgggaagcaaggctgctccaggggctgtgggccccactctcctccccttctgccctgatggtggggatgggggtggggacagccccagcagagagggcccctcccgatgggacatgaagccagatggcagtcaggctctgtgggcagctgcatgtgcccccgacgtcccagcagccagcttgcagggaggggggaggccaggcctgtgcaaggaggactcctgtccagctcaggaagctcttccaggggttaaaggcagccctcccctctcccagtcacatgtcttctggtcagcaggagccagaggttccttccaggctgggtcacttcccatggtgcccccaggtcccccagggcagaagccgcagcatgtgcatctccctccccgttccagcagctgcagccctgcagctctcgcctcgggtacagcctggtggcgtaaggaggaggcagagtcccactgatacctcaggatctcctcccccagcttgcaaggctggggggcccacatctggaggccaggtgctccttggggcaggcggggctgcggggccctgatcctccctgccactggccctgactcatgcgtctacccttgagtcacagagggaggccctgcccttccctcagtctgtgtgcccagaccaggcaggccaagtggcccatcctgccggctgggtgcctgtgccagaacctaggcagtccctgtggtgtggatttggcttcccccacctggctcttggcctcaactgaggtccccagcggcgttggggtagcccggggcccaccaccctccctctgtccagagcaactttgctatgctttcccggctgcacacatgcacagacggcagggcctgagaggcagcgcctggccacatcccgggcactgcctgcttccccgtgagtctttggcaggtccctcacacctgccaggtctagtaataggacataaagatgagccaccagcctcccagtctcaggtggaattcgtgagctggtgcaggtcaggtacccgtggtggtgatgaaacactgatcagaataggcgctcggtgccactgtcacaggagtgcaggaacgaatggatgacaggctgggagcacccagggttgggggtcttggggtcctttggaagctctgccaggcagtgtgggatgtgtcacctgacgccagcacccctccctgccccactcccaggaaacatgtttcctaccattggtgacgtccaccttgcacccttcacggatgaacagctctacatggagcagttcaccaaggccaacttctggtgagtgtgccctgggtgtcccgcctgggccccacagcctgccttctcagggacagccccagctccccagagagcctgcactcctctttttctgaaagacttgggctagatgagggctgactgggagagaaggcagggctaccccacctgcctcttctgcagccctgaccttgctgtgggggtggggcctgtccacaggtaccagccatctttccatggagtggacctgtcggccctccgaggtgccgcggtggatgagtatttccggcagcctgtggtggtgagtagggcctccagggtactgctgcagtgatcacttgccattgctgtgcagctgtgcagccctcaggaagctacagcccctctctgagccctctcctctgccctgcacagcgctctcacagagatttgggccaaaagtgtcaatgcatgtagacacttagcacacagcacacatgcaatacatgtggaacattattaggtgaggctaaggcagagggggcatttaggctcaggagttcaagatcagcctgggcaacacagagacgccatcgctatttttaaaattaaaataaataaataataaaaataaaaaagaaccattactagatgaatttatccttggtgagctgatgtgatttattgattgattttacttgagatttttgatacatagatccatgatttaaaaatcaaaaggaaaaaaaagctaggtgcagtgggtcacacctgtaatcccagcactttgggaggccaaggcgggcagatcacgaggttaggagattgagaccaacacggtgaaaccccatctctactaaaaatacaaaaaattagccagacgtggtggcgggcgcctgtagtcccagctactcaggaggctgaggcaggagaatggcgtgaacccgggaggcagagcttgcagtgagccgagatcgcaccactgcactccagcctgggcgacagagtgagactccgtctcaaaaaaaaagaaaaaaaggttccattttattctgttttccccctgctcttgatgtttttcattcgttttgggagactcttggactatcttggatactatctctttaaacactacgtctgccccattctttctccttctgggattccaattacgtgtacagtgaaccttttcaccatatctcagatgattgttatactcttttctgtcttttccatccatttttttctctcattttctttttctttttttttttttttttgagacggagtcttgctctgttgcccaggctggagtgctgtggcatgatgtcagctcactgcaacctccactttccgggctcaagcgattctcagactcctgagtagctgggagtacaggcgcttgccaccactcccagctagttttttgtaattttagtagagatggggtttcgccatgttggccaggctggtctgaaactcctgaccttaggtgatccgcctgcctcggcctcccaaagtgctgggattacaggcgtgagccaccatgcccagcgtgttcagtcttttgtgatatcactggggagtgaatgagtgaaaaaagcaggaaatattttggtggtattatgcaaattttgtattatgatgagggtgccttggaagaggccacagtttgagaaggtgctgctttatggtacagcctttggtaatgttaatgcaagtccagtggttagcctcattaccaatatgctgctgaaccacccgttagcttttattgttttttgaaacaggatctcactctgttccccaggctggagtacagtggctcaatcacttcatggcttacttcagcctcgatctcccagacgcaagtgatcctcctgcctcagcttcccaagtagctggaactataggagtgtgccaccatgcccggctaatttatttttttgtagatatggggcctcactgtgttactcaggctggtcttgaactcctgacctcaggtgatccgtccgcctcggcctcccaaagtgctgggattataggcataagccactgcacctggcgttgagcctcttattagcggctttctgcttggtgtcttagcctctgatgccctgcctcgctcaaagctcaggagttggccaatttcacaagcgcactgagtgtgcaccgcccaccttgccctcctgcacttatttccctttgctttgacatcacagccccttgaatccgagctgccttggtaaccctgagctcccattttgctttccccacccaaggaagctgctgaaaggtcgaggtggccgttttctgccctccccatggggaaaaggtagaggccagaaagggctccctccagaaagggcatttccctcctttccaggagcttgatccccaaaatcctggccgctctggttggtcaccagtgcttccaacaactggtttattcttttctttggattttattcggtttacatagttcatggcaggtgtgttagtcggatataaacattgctgggagtggacagcagcactagtgttgttgttgtttttaagagacagggtctccctgtgtttcccaggcttgattcacactctcgggcttaagcgatcctcctgcctcagcctcctgagtagctggagttacaggcatacaattccacacccagctagcacctagttctttaacttgcttttttggttaacttgcttaatgatttagcttggagatctttcctcatctgttcataaagagcctcttcattctttctcacgtccgcatggtctttgatgggagagccatcactggtttaattagatggtttccagtgtgtcgctaccacggacaatctaattatacatgtaagtttgttgatgtgttcatgtatctggaggttaaactcctgtagtgccaaatcttttatgtggataaacacttgtcatttggagagctgtcacctgattgccctcggtggcgttgtgccggtcccctcctcacggcgtgtctgggaagagcaagctcgttttagctgcacagcctagaagccgtgggcagacctgggggaaggggcagggctctcccctcccatgctggccctggcgtcagatgccacgtcacacctgtggtctctcccaggacacatttgacatccggatcctgatggccaagtctgtcaagtacacggtgaacttcttagaagccaaagaaggagatttgcacaggtactggcacccacactccatcctcccaggcctggctcaggccgaaggtcagggccacccctggctcccgccggcatcctgccgtcccagggcagatggtgggcgggggccccaggcctctgcacctggcaccccctcttctctctcggcagcgcctgtctggcttccccagcagccactgccctttgccttccaggatagaaatcccattcaaattccacatgctgcattcagggctggtccacggcctggctttctggtttgacgttgctttcatcggctccatgtgagtgccgcagagcagcccatgctgcctcctccccactcccagggcttcctgcagctgcaacctggctgggggggtggaacatggctccaggttccaccatcccttccaatgggagtgagagcctgtctcggagcaagagactgttgtgggtggggtgtgtgtgtgtgtgtgtgtatgtgtgtgtgtgtcctgtgttcccagtgtctgtccctcatgggtctgtgtctgtctcttggcacatgtcagggtgagtagggatctcgtggttgcgggcccctcgtgtgtacatgtatgcctgctcatgtttgtgtctgggactgcctgggggccagcctgtctctgctccagggtcccaggggtccctggcagagggggcaggtgcttggggaggactcaaggcatacaaggtggtggctccagtggtggcgccggcccagtcaagtatgtgcctgtccctgctccacagaatgaccgtgtggctgtccacagccccgacagagcccctgacccactggtaccaggtgcggtgcctgttccagtcaccactgttcgccaaggcaggggacacgctctcagggacatgtctgcttattgccaacaaaaggtgcgactgctccctggggctggtggtggtgggcaggggtccatctgcccagcagctcatgccacggcctgcaccctgtccgcagacagagctacgacatcagtattgtggcccaggtggaccagaccggctccaagtccagtaacctcctggatctgaaaaaccccttctttaggtaggaggggccccttgcctgcacaggggggcgccccggccctgcaacccccttgcccctgcccatggctctgtctctgccatagatacacgggcacaacgccctcacccccacccggctcccactacacatctccctcggaaaacatgtggaacacgggcagcacctacaacctcagcagcgggatggccgtggcaggtgagcagggcccaccccaatgcccagccaacccgggaggccgccctcgccgcaggcctggcccctctgcctccagccctgacgtctccctctctggacacagggatgccgaccgcctatgacttgagcagtgttattgccagtggctccagcgtgggccacaacaacctgattcctttaggtgagtgtcccccagggccaggggcagcagggagccatgcccaggactgcccaggggccgggaagggcctgtggtgaccagggtcggcctctgcttggtcctttcaccttttcctcttcctgggggctctcggccgaggctctccgtcctctctgcctcgctctgcagcctgctgctgtgcatgggctgggtggctgggggcggtgacgccgtctcccttccttctttcctccctctcgctgcgcagccaacacggggattgtcaatcacacccactcccggatgggctccataatgagcacggggattgtccaaggtaacgagggtggcgggggcagggcccgtgggggccgagctagcgtgtgagtcgccatcctctgtccggccgcccgcctgccctcttgcctgccctttctctctctctgtgactctgcctgggggctgggcgggccagggcagcccctcactgccattgcctgctccacagggtcctccggcgcccagggcagtggtggtggcagcacgagtgcccactatgcagtcaacagccagttcaccatgggcggccccgccatctccatggcgtcgcccatgtccatcccgaccaacaccatgcactacgggagctaggggcccgccccgcggactgacagcaccaggaaaccaaatgatgtccctgcccgccgcccccgccgggcggctttcccccttgtactggagaagctcgaacacccggtcacagctctctttgctatgggaactgggacacttttttacacgatgttgccgccgtccccaccctaacccccacctcccggccctgagcgtgtgtcgctgccatattttacacaaaatcatgttgtgggagccctcgtcccccctcctgcccgctctaccctgacctgggcttgtcatctgctggaacaggcgccatggggcctgccagccctgcctgccaggtcccttagcacctgtccccctgcctgtctccagtgggaaggtagcctggccaggcggggcctccccttcgacgaccaggcctcggtcacaacggacgtgacatgctgctttttttaattttatttttttatgaaaagaaccagtgtcaatccgcagaccctctgtgaagccaggccggccgggccgagccagcagcccctctccctagactcagaggcgccgcggggaggggtggccccgccgaggcttcaggggccccctccccaccaaagggttcacctcacacttgaatgtacaacccaccccactgtcgggaaggcctccgtcctcggcccctgcctcttgctgctgtcctgtccccgagcccctgcaggtccccccccgcccccccactcaagagttagagcaggtggctgcaggccttgggcccggagggaaggccactgccggccacttggggcagacacagacacctcaaggatctgtcacggaaggcgtcctttttccttgtagctaacgttaggcctgagtagctcccctccatccttgtagacgctccagtccctactactgtgacggcatttccatccctcccctgcccgggaagggaccttgcagggacctctccctccaaaaaaagaaaaaaagaaaaagaaagaaaaaataaatgaggaaacgtgttgcagcacaggcagttttcttctccttctgctcccctgtttctcatacccccaaactcagatgctggagctcaggcccgccgtgtgtgcacccaggcaggagcgggcgctgtccaggctgggccgcccccttggctctccctcctgttccaggggagccataggagggaaagcaggtggcccgggggggatatgggggccccagccctgtcccaaagctccctgctcggctgcccctcgcccgcctttatataaattctctgaatcacctttgcatagaaaataaaagtgtttgctttgtaagaaaagtctggaaagtagcagaatcatctcaaggtgtcaaaggagccttcagtcatcgtctggggggcaggacaggcagaggggttggtccacttaggtgttgcctgaaagaaagaattgtctgggagtggccccagaacctctcgccttgactgggagtgggagggcagcccccttagcccagctgggaatagtccttacctgtgggacccgggccttcctaggagggggccagggactgcggcaaggtaggggacagcgcgatgtttgagggcagagatgtgatttggggtggaggagccacgttctccggaggcagcgactggaagaagtacaactgcacaagacccctggggtcagaggcagggccagcccatgcccccctagcccctcggccccacctgtggccaccccagacccgtaccttacagcccatggccaggagggcgtggagcagcacgaccacggacagcagcactgtggccaccagcctggtgtcctcacggaccacgggccagagggtgaataccagcccggcggctgacaggcccagggccagcgccccaaagagccactgcagccaaggcacagggatgagccacaggacctgggagcaacacggcggcaggtgaccatgccagtccccccagccaccacccactctgcaccaggccaccctcaccaccatgggaatgaggcggcaggtgaccatgccagtgtccccacacagccaccacccactccgcgccaggccacactcaccaccatggggatgaagacaaagagggagtagccgtagatgcacacagtctccaggaaggtgtagggccccatgcgctcctggacacccttgcgccaccgcaggaagccccacagggccaggggcaccagccacgcatagcagtagatgctgatgcctgccacggtcactggggggggcaaggtgagcagtcaccccctgtaccccagggccctgccaggcattgggcctgcccgtctgcttacccttgtggaactgggggctgtagtggatggaggggtccctcctctgggccagcaccagcgtcaggttgccagtgacggccaggacaaaggccaacgtggcacagatccagaaggggcctgggggtagggggcacagtcagggtcccgggccctgcactcccaggacaagcagacatgtatcctgactgagctgtgctgagaccccagcctcttcctaagcaccttgcctgactcaccaggacaccgggggcctcctggtggctgagcccagtgctggctgtcagttcatccccctccccgaaacactcaggactgcacacccttggcctgtgtctcacctcattggtgccaattcctcaacccctgtcacctcctctttgactctctgaccccttcagccatggggagcagccaggcccagttcttggccccttccatgtctgcgttcacccatagtatgacctccttcaagcccagggccttatgcctcctctagagcccagggctctgccctgagcactgcaggctccagttcaagctcccgggtgggcatctccggcttcatccacacccttgccctctgccctcactgccaagctggtcccgtggatacgtggcaactctatccatcccgttagtccaggcagaaatccctagagcctgcctccgctcctaacctcccactccccccacccccacctatctagccacaaagccagtctcttctacttccccagcacgttccagaatccagtgccactctccacatccacagtccccaccatgtggccgcctccaccccagcctcctggcttccgccctcgccactcatgatggcgagagggaccccgaaaacacttaaagatccattctcggccagataacagtgactcacacctgtaattccagcacttaggaggccgaggcgggtggatcacctgaggtcaggagtttgagaccagcctggctaacacggtgaaactccgtccctaataaaaatataaaaatcagccgggcatggtggcacgtgcctgtaatcccagccactcaggaggctgaagcaggagaatcgcttgaatgcgggaggggaagattgcagtgagctgagatcacatcactgcactccagcctgggtgacagagtgagactctgtctcaaaaaaaaaaaaaaaagatctcttcttgccacagcatgggaggcttgtgtgatctgtcccctcgcctgtgacctccctgcagctcactcgctccagtggtaatgccgccctgcagttcatgcaagttcctgccatgaagcttacgtcgtttctggaagcctcttttcctaggtctcccccacccctcctgttgccaacaaggctcattccctcaccctcctcagggaggcctgccctgctgcaccctgcagaactgcagggccactcctcctgtctgctctgctgctctctacccgccaccctctgcagtccttcatgtctctgtctccctgaacagcaggtaagtcacactgtctgagtgactgatttgtccgcagctatacactggcatctgcaactcaggccacacttgttgagtgatccatcaaggaaccaaatgcacaacctcactcaccatacagatccggccgattccgcagatggtgccgcacaaagttgtggccaggccggggcagcagtgagcctttgatccggtccaggacctgggggcaaggccaaggtcaaggatggaagtctgccaggagcttctcccttgtcctgagaggctccttccctgctgacctccacccttctctttccatgccccacctgaaagaactcagcctttccctctctttttttttttttttttttttgagacagagtcttgctctgtcggccaggctggatggagtagtggcatgatctcggctcactgcaacctctgcctcccgagctcaagcaattctcctacctcagccacccgagtagctgggattacaggcgtgtgccaccacgcctggctaatagttgtatttttaatagagacgggatttcaccatgttggccaggctggtctcgaactcctgacctcaggtaatccacccacctcggcctcccaaagtactgggattacaggcgtgagccaccgttcccagccccctcttttttttccctctttttttttttgttttgagacggagtctcgctctgtcacccaggctggagtgcagtggtgccatctcggctcactgcaagctccgcctcctgggttcacaccattctcctgcctcagcctcccaaagagcagggactacaggcgcccaccaccacccccggctaattttttgtatttttagtagagatggggtttcaccgtgttagccaggatggtctcgatctcctgacctcatgatcctcccaccttggcctcccaaagtgctgggattacaggcgtgagccaccgcacccggcctcagcaccccctttttctttttgagacagagtctcactctgttcaggctggagtgcagtggcacgatcttggctcactaccacctccgcctcccaggttcaagtgattctcgagcctcagactcctgagtagctgggactacaggtgtgtgccaccatgcctggctaatttttgtatttttagtagagatggggtttcaccgcgttggccaggctggtctccaactcctgacctcaagtgatccaccgcctcggcatcccaaagtgctaggattacaggcgccgaccactgcacttggctaatttttctattttattttattttttatttaattttattttatttatcttattttatttttgagacagagtctcattctttttgcccaggctggagtgcactggcacgatcttggctcactgcaacctccgcctggcggattcaagcgattctcctgcctcagcctccagagtagctgggattacaggcgcccaccacaaagcccggctaattttgttgtatttttagtagagacggggtttcaccatgtttggccaggctggtctcaaactcctgacctcaggtgatccacccacccaggcctctcaaagtgctgggattacaggcatgagccaccccgcacccggcagtttttgtatttttggtagagacggggtttccccatgttagccaggctggtcttgaactcctcaggttatctgcccacctcggcccccttaagtgctgggattacaggcaggagccactgcgcccagtccatctttggtcttctgcatatgctgttccctgtgcctggaacatatactcctgcttccctaccctattccccagggaagccttctgtctcctttaggtctcagccaattcctcacctcccccaggaggcctttctctaacccaccagattgtgtgtgtcccctgtgttcccatagtcccgatccataaccagtcccaccataaccctttgagagcaccacagttcgttcaccagcacccaccatcaccagcaccctgcccaggggaagagtggctgaaccctgagcataactctgagccccatcccacctgcctccccagcctgacctgtgaggtgtccacgtcaaagaagctctgatagtagctgaaggtccagaatcccggctgctgctgctgctgctgctcctgcaggagctgcacattgcgggcattcagtgcctgcccggagagcctgggtcagctgggggctgcaaggaggcaggacacagggactcaccgcggccttgtcactctcctcctccacctcatcctcggctccatagctgccacctgagcccacggccacagccacgtgcccttgtggggtcagctgatcgcttctgctggtggtggctgcatctggggtgtcagccagaagattagtggcctcctcgaattctgtggaggaggtatatgggacacacgcacgtttgaggggtggaaagaactcgactgggcccaagctaaaccgatgctcatctgggggcggaggctctgctgagccattgatctcccccaaggtggggcccaacttcctcagtttggaggcatccggaggacatctgttcccttcctcctaaagtggaactgcaacttagggttgacgctgggatggggtcagggtctggggacgagaggctcgggtttgaggtctgagttcagggcgggggcggggttcgagtcagagatgggtctcactcctgggtcagggttcacagccgcctaggcttcggggtagagaaattggaagccgtatcggggggaggttctggcccggggcgggagtgggagatccggccacgtcggggccgcactcaccatggaaggtcagctcgtcggccgatgccatggtcgttcaggggcgtctccgcatccctcgctgaggacagagaccggtcaggcacacttcccccccgcccccgagccggtccctcggcccccagccctacctggcgaccaactgcacccacggaggcttgaactcgtcgtcccgtccccacaggtgcgctccgccccccctcacctgaggccacctgggccggcgtggctggggctctctgcgcctgcgcgtctcgcctacccgtcagactccaaccgactcagacctgacagcaacatccggcgcctgtcctctttctatcctctcccgttgggaagccacttccggtaaagttggcgcttgcgcagaagagactcccgggctcttaacgtcgggtatcaggagtttcttcccggagcaaggacccccaagacggaagaggatggccgcggcggctctgaggagattttggtcccggcgccgcgcagaggcgggcgacgcggtagtggcgaagccgggagtgtgggcgcggctgggtgagtagcggcggaaggcggcagggtgggtggccgccgcgacagggtgggtggccgccgcggccggatcactcttaccgcgctcctctcccctcagggtcctgggcccgcgcgctgctccgggactacgccgaggcctgcagggacgcttcggcggaggctagggcccggccggggcgcgccgctgtgtatgtgggtctgctgggcggcgcggcggcctgcttcacgctggcgcccagcgagggtgccttcgaggaggcgctgctggaggcgtcggggaccctcctgctgctggcgccggccacccgcaaccgcgagtccgaagccttcgtgcagaggctgctctggctgcggggccgtggccgcctgcgctacgtcaacctggggctctgctcgctggtgtacgaggcgcccttcgacgcccaggccagcctctaccaggcgcgttgccgctacctgcagccccgctggaccgacttccccggccgggtcctggacgtgggcttcgtgggtcgctggtgggtgctgggggcctggatgcgcgactgcgacatcaacgacgacgaattcctgcacctgccggcgcatttgcgggtggtcgggccccagcagctgcattccgagaccaacgagcggctcttcgatgagaagtacaagcctgtcgtgctcaccgacgatcaggtggaccaggcgctgtgggaggagcaggtcttgcagaaggagaagaaggacaggctcgccctgagccaggcccactcgctggtgcaggcggaggccccgagatgaaaccctgaggcccccgagtcctggcaaactgcttgcctggggtggtgcagttctgagtgtgcctcacctgcagaacagctgagacagatgatgtgcaaagtgttttctcactggatttgcacaagtttggggagcctttctgccccccgtctttgttctttattagctgaagctaattcagagccacctgggtccgggagttggggacagcagaacgacttgacacatgttcatcactggcagagctggtcatgagccttttatataagcctttttcatcgggcctcagaggccctccttaaggaggtaccacattggtcagctgacttgcaaactcttctaaggccacttagattttctttttcaagtttgggttgtggcctggcatggtgatgtctgtaatcccagcagtttgcaaactgaggcaagagaatcgcttgaggccaggagtttgaggccagctagagtgacatagcaagactccgatgctacaaaaaagaataataatagtaattaactaaataaaatttgagctgaaatgtttttattctatgacctattctctctcgttttttttttttttttttttgagacagggtcttgctctgttttgcctgctggagtgcagtggtgcaatctcggctcactgcaacctctgcctcccaggttcaagtgattctcctgcctcagcctcctcagtagctgggattacaggcctgtgccaacatgcctggcaaattgttgtatttttaatagagatggggtttcaccatattggccaggctggtcttgaactcctgacctcaggtgatccacctgcctcgcatttccaaagtgctgggattataggagtgaaccaccacacctggcctttcattttgataagtaacatttttgccattcccagctctttggaaggctgaggtaggaggattgcttgagatcaggagttcaagaccagtttaggtaaaatagtgagagctttctcaaaaactaaaatatttggaagggtaaagcaggcaaatcatttgagcttaggagttcaacaccagcctgggcaatatggcaaaaccccgtctctacaaaaagtacaaaaatttaccaaaggtgttgaatgagaattgaaaatatgtatacatagaaaaattagccagacatgttggaccatgtctgtagtcccagctattcaggaaggctgagatgggaggatcacctgagcctgggagttcaacgctgcagtgagccacgatcgtgccactgcactccatcttggacaacagagtgagactgtctcaaaaagtaaaataagtggatgggcccggtggctcaagcctgtaatcccagcactttgggaggccgaggcaggtggatcacgacgtcaggagatggagaccatcctagctaacacggtgaaaccccatctctactaaaaattcaaaaaaattggccgggcgcggtggctcacgcctgtaatcccagcactttgggaggcccagtcaggtggatcacgaggtcaggagatcgagaccatcctggctaacatggtgaaaccccgtctctactaaaaatacaaaaaattaccggggcgtggtggcgggcacctatagtcccagctactcaggaggctgaggcaggagaatggcatgaacctgggaggcggagcttgcagtgagccgagattgcgccactgcactccagcctgggcgacagaacaagactccgtctcaaaaaaaaaaaaaaaaaaaaaatagctgggcgtggtggcaggcatctgtagtcccagctactcaggaggctgaggcaggagaatagcgtgaacccgggaggtggagcttgcagcaagcagagattgcaccactgcactccagcctgggcaacatagtgagactccagctcaaaaaaataaataaataagtaacatttttgttttgatttttttaagtttttttttgagacagagtttcgctcttgttgcccaggctggagtgcagtggcactcgccccaaccaccgcctcctgggttcaagcgtttctcctgtctcagcctcccaagtagctgggattacaggcgcatgccaccacgcccggctaatttttgtattttttagtagagatgagatttcatcatgttggtcaggctggcctcaaactcctgacctcaggtgatccgcctgcctcagcctcccaaagtgctgggattgcagacgtgagccaccgtgcccggccctcgttccctattaaaaatacaaaaccaggcaattgacagtgtcatgactattgggatgttacagggaagttttttgtaaaacaacctgtttaccagatgagcattgtaagttactggaggtggcttggaaggataaagcattttctggtctggaaatctatatggaatcatagattctggttatgttgtacttcagtaaccctgaaacagaattctatgaaaagaagtaagttagtgtacacagctggtacttagctaggttatggtaaattgtatttttgttgttgttgttgttgttgagacagagtctcactctgacacccaggctggagtgcagtggcacgatttcggctcactgcaacctctgcctcccaggttcaagtgattctcttgcctcagcctcctgggtagctgggattacaggcatatgccatgatgcccagctagtttttgtatttttagtagagatggggtttcaccatgttggccaagctggtctcaaactcctgacctcaagtgatcctcccacctcggcctcccaaagtgctgggattataggtgtgagccactgcgcccggccaatatttttttttttttttttttttttttgagacagagtttcactctattgcctaggctggagtacagtggcatgatctcggctcactgcagcctctgccacctgggttcaagcgattctcctgcctcagcctcccaagtagctgggattacaggcatctggcactgcgtccggctaattgttgtatttttagtagagacgggatttcactatcttggccaggctggtcttgaactctttgtgatccacctgccttggcctcccaaagtgctgggataataggcgtgagccaccacacccggcctcaatactttttattttttttaagtgtaatttatggccggcgcagtggctcacacctgtaactacaacactttgggaggccaaggtgggaggatcgcttgagtccaggagttcgagaccagcctaggcgacatggtgaaatcctgtctctacaaaatacacaaaattacaaaatacacaaaaattaatcgggtatggtacacacctgtactaccaactattcaggaggctgaggtggaagaattgcttgagcttgggaggttgaggctgcagtgagccaagactgcatcactgcactccagcctaggtgacagagcaagccccgtctcaaaaaattaataaggctggatgcggtggctcacgcatgtgatcccagcactttgggaggctgaggtgggtggatcacaaggtcaagagctcaagaccatcctggccaacatggtgaaaccccgtctaacaaaaattagctgggcgtggtggcgcacgcctgtaatcccagctacttgggagactgaggcaggagaatcacttgaacccgggaggtggaggttgcagtgagccgagatcacgccactgcgttccagtctgggcaacagagtgagactccgtcacacaaaaaaaaaaaaagagaaaaaataaataacataaaactgaagtattaagggagtgatgctacctcaggggcctgtggcaagttaataaaaccaggtggtaaaacaactatctttgtttgtgatacttgtttttgtgtgtttgctactttcaaattttggcatttgacccttgcattcataatcagtgggttgaacaggtgttggtttaagtcagcatctcacttttacagaggaaaagctgaggttcagaaaatttatttttccaaggctgtggcaggaccaagattcgaactgtaactcccagctctgtgacttaatcctcaaacttgtggactttgatcctaataattcttgtcagaaatagttaaatactgctatcagttgccataaataaaaattggatatagaaatacatatataaagccgggcgtggtggctcacgcctgtaatcccagcactttgggaggccgaggcgggcagatcacaaggtcagaagatcgagaccatcctggctaacacagtgaaaccccgtctctactaaaaatatttaaaaaattagccgggcgtggtggcaggtgcctgtagtcccagctactcgggaggctgaggcaggagaatggcgtgaacccgggaggcggagcttgcagtgagcggagatcgagccactgcactccagcttgggcgacagagtgagacttgtctcagaaaaaaaaaaaacaaaaaaaaaaaccagacatatataggctgggtgcagtggctcacgcctataatcccaacactttgggaggccgaggtgggcagatcatctgaggttgggagttcgagaccagcctgaccaacatggagaaaccccatctctactaaaagtacgaaattagccaggcgtggtggcacatgcctgtaattccagccactgaggaggctgaggcaggagaatcgcttgaacccgggaggttgtgatgagctgagatcgtgccattgcactccagcctgggcaacaacagcaaaactccctctcaaaaaaaaaaaaaaagaaaaaagaaaaaaagaaatacatatataaaaaagaaatgcaataaaaccaaaagacacagcctggataacatagcaacacctcgtctctactaaaaataaaaataggccaggtgtggtggctcacatctgtaatcccagcactttgggaggccaagacgagtgggtcacctgaagttaggagttcaagaccagcatgggcaacatggtaaaaccccgtgtctattaaaaatacaaaaaattaaccgggcatggtggcaagcacctgtaatcccagctactcgggagtgagccgagatcatgccattgcactccagcctgggcaacaagagcaaaactccgtcccaataaataaataaataataattaaaaaaaaaatagccaagtgagacggtgtgtgcctgtggtcccagctacttgtgaggctgaggtgagaggatcccttgagcccaggagtttgaggctgcaatgagcttggtcatgccgctgcactccatcctgggccacagagtgagacactatctcccctctaacccccaaaaatgaaaggaaacaaaagacgtcgagatgatactaactaaatgctatctctacaccattacctgccaaaaatctctgtccccaaatctgccctctgttagacattagccaacttcagggaagggttttaaggtgtcatcaaagacacttgtttctcattgatcagaagtattggaaagggtccacaccatcattgcttgagtcagttattaaatgccacttttgacttctcgccagggtgtgttccaggaagatcatctgaagctgctgggagcttgaagctgagggcagtggtcggcgctgttggtaggaattgtggagcttgggcagcctgaaggctttgtgtcttggctttgggcagagggtcagcttttcccagaggtctcactgtacttcagcccatgctctggtgtaaggcagaggacaggaggcataagtgggctttaaagccaggatttggaactcagcttttacacttccttgctttgtgagtgaagtcacttctccatgctttgggctccttatctctaagtgtgggcttgtcagaaaaatttaaaagcccactaaagcacttggtacagagtaggcattcacagtctgtggtgcggctgtgcagggaagattatggctccgaatccatgctgtgaccttcctaagtggttgtggaggggctgatgcaccctgcctagtggtgcagggccaccatgtagggagggcccaatgtctgataggatagagccaaggcacgcttctttctcagatccaagtgacagccgaatctaatatgaacatttctgagttctcccccacaccttgttttcagggacggtctcactctctctcccaggctggagtgcagtgatgcaatctcagctcactgcaacctcgacctccctggactcaagctgtccacccacctcaggctctcaagtagctgggactacaggtgtgcaccaccatgcccagctaacttttgtgtattttttttgtagagacagggtttcgctatgtcacccaggctgttctcgaactcctgaattcaaatgatcttcccacctcggcctcccaaagtgctggattacaagtgtgcatcactgcacccggcctgagttctcccttgaaaaaaaaggcgggggcgggggggagcagtttggagatagggtctcgctgtgtcacccaggctggagtgcattaacgacccattgcagcctcgacctcttggattcaagcaatcctcccacctcagcctcccaagctgctgggaccacagacacacaccaccacaccggctaattttttaagttatttgtagagatgagatctcactgtgttgcccaggctgatctcaaactcctgggctcaagtgattttcctgcctcagcctcccaaggaaataaaatattcttggattcttggttagctttaattatttccgctttccaggctagcccaggagttgccctccagcacgtcctttgaaaagtacttttcggccgagcgtggtggctcacgcctgtaatccaagcactttgggagaccgagatgggaggatcacctgaagtcaggagttggagaccagcctgaccaacatgacgaaaccctgtctctactaaaaatacaaaaattagccgggcatggtggtgggcgcctgtaatcccagctactcaggaggctgaggcaggagaatcacttgaacctggaagacggaggttgccgtgagccaagatggtgccattgcactccagcctgggagacagagcaagactccgtcttaaaaaaaaaaaaaaaagtatctttcccactgttgtgattagaaagaccagcagagggcatcagagacttagttcggagacagaacgtagctgattccatcctgccttacttagcccccatggaatggctcaacgcaggttccttttgtccgcgggcagcagcaagtggaggtcgtgcagcttccacttgcaccagtttactgtgccttggaattggatagatgatggcagaagtcgaggccccacggaggggccaccttcatctctggaacctgcacctttacctacttatgtccacaaaaagagtcagactctgaatctttttttgtttttttttttgttttgttttgttttgagacggagttttgctcttgttgcccaggctggagtgcaatggcacgatcttggctcaccgcaacctctgcctcccgggttcaagcgattctcctgcctcagcctcccaagtagctgggattacaggcatgagccaccatgcccggctaattttttgtatttttagtagagacggggtttctccatgttggtgaggctgctatcaaactcccaacctcagctgatccacccacttcggcctcccaaagtactgggattacaggcgtgagccaccgcgcctggcccagactccgaaaatatctgaagagatttattctgagccaaatatgagtaaccaatggcctgggacacagccctcaggagatcctgagaacatgtacccaaggtggttggggcatagtttgcttttatacattttagtgagacatgagacatcggtcaatatgtgtaagatgggctgggggtgccctggctcacacctgtaatctcagcactttgtgaggccgagaggggcagattgcttgagcctagaagttcaagaccagtctgggcaacacagtgagactctgtctctacaaaaaaatacaaaaactagccagatgtggtggtgcgtgcctgtagtcccagctacttgggaggctgaggtgggaggatcacctaagttagagaagttgaggctgcagttgaccacgctgatctcgaactcctggcctcaagcaatgatcctgcctcagcttctcaaagtggtgggattatagacgtgaaccaccacacccagccaacagaagttctttgttttttttttttggtcccaaactttaccgttgacaaccgaagtattttaaagcaaatcccagatatcctgtcatattacccctataatttcattttctttcttcctttttttttttttttttttgagacagattctcgctctgttgcccaggctggagtgcagtggcatgatctcgactcactgcaacctcccaggttcaagcaattctcctgtctcagtctcctgagtagctgggactacaggtgcacgccaccacgcccagctagtttttgtatttttagtagagacagaggtttcaccatattggtcaggctggtctcgaattcctgacctcaggttatctgccccctttggccccccaaagtgtttggattacaggtgtgagccaccacgtctggcctataatttcattttcttatatcatgacactaccattatcacacctatcaaagtccacaattattatttggtatcatctgatattacatttccctgaggatctcaaaagtgtccttttacacttggtttgtttgattcatgatccaaacaaagttcacatactgtatttcgttgttgtgatttttcagtctctcttttttaagacggagtctcgctctgtcgttcagactggagtacagtggcacaatctcacctcattgcatcctccgcctcctggcttcaagtgattctccctgcctcagccttttgagtagctgagattacaggcacccaccaccatacccggctaatttttgtattttcagtagagatgaggttttgccacattggccaggctggtcttgaactcctgacctcaggtgatcctccctcctcggccttccaaaatgctgggattacaggcatgagccactgcgcccaaccttaagtccttttttttttctttttgagacagagtcttgctctgtagcccaggctggagtgcagtggtgcgatctcggctcactgcaacctccacctcccaggttcacaccattctcctgcctcagcctcccgaatagctgggactacaggctcccaccaccacacccggctaattttttttttttttgtatttttagtagagatggggtttcaccatgttaggcaggatggtcttgatctcctgacctcgtgatccacccgccttggcgtcccaaagtgctgggattacaggcctgagacaccatgcccggcctcttaagtctcttttaacctagaagagtgccccctatgcatacacttttgatgtgttgcagaaaaccactttttttttttttctgagacagagtctcactctgtcgcccaggctggagtgcagtggcgtgatctcagctcagtataacctccccatgccgagttcaagtgattctcctgcctcagcctcctgagtagctgggattacaggcacctgccaccacgcccggctaatttttgtatttttattagagacagggtttcaccatgttggtcaggctggtctcaaactcctgacctcaagtgatccacccgcctcaccttcccaaagtgctgggattacaggcatgagccactgtgcccggcccaattttatcacttctgatgggtgcccaggtcaatcgtttcattaatagctgtacaaagaagccagttcttttgttcttgcaatcttatttatagctggtgagccacaggcatttcacatttcctgttactgattcaccaggtgaacaaataaaaacctgaaagagccagtccttcaagatggatctggagtggcagactgggcttcaattttaagtacacccaagcaaccatttgctgaatagaggtcacacatgtattctgagttgccccaaaactcacgcctccgttttaacttttggacattcagaggtctcctggaccaatcagtcagaactcagatgtgtcaaccagtaaaaactaggcaagtttgactccctgatttgcataaacagacttgagtgggaacctgggctggaatttttgctataatacctgaaccctcgggaggctaaggcaggagaattgcttcaacccaggaggcagaggttgcagtgagctcagattgcgccactgcactccagccagggtgacagagccagactgtctcacaaaaaaaaaaaaaaaaaaaaaaaaaaaaaaaaaaaaaaaaaaaaacctgaaccctccctttgttctctggaatgcaccttcattttacaccaaatactgtgtctcttcagtttgcaaactgttgactggaatacaatctattccctccaaattccttttcagagaacattggttcacaatcatgtcctaccagaaggagtttctggggaattcacagccatctacagaagacatccttgacttgccttttgaggtttccctcagggcagccacaaggatgctgtgttcctttcccatgttgtggcaggccacagtgacaatttctttttctttttcttttttttttttttgagatggagcctcgctctgttgccaggatggagtgtagtggcgcagtcttggcttactgcaaactccacctcccaagttcaagcgattctcctgcctcagcctcccaagtagctggaactagaggtgcatgccaccatgcccagctaatttttgtacttttagtagagacggagtttcagcatgttggccaggatggtctcgatctcttgacctcgtgatctgcctgcctcggcctcccaaagtgctgggattataggtgtgagccaccatgcctggcccacagtgatgattatgaatagctattcattatttgaaaatgaatagtatctgaagtatctgagacaggtctccatcaaattagaaattcattttgccaaggtttaggacatgcctggaagaaataaacacagggccaggtgcagtagtttacacctgtaatcccagcgttttgggaggccaaggcgagcagataacccgaggtcaggagtttgagaccagcctggccaacatggtgaaaccccatctctactaaaaatacaaaaattagccgggcgcggtcgtgggcacctgtaatcccagctactaaggaggctgaggcaggagaatcgctgtgcaccactgcactccagcctgggcaacagagggacagaaagagacagagagacagagagagacagagggaggcagggagggagagagggaggagtggggcagggagggagggaaaggaaaggaaaggaaggaaagaaaagaaaaagagaaaaagaacgaaacatagaatcacggacacagttcataatctgtgtctttctccaaaaattattttgagggcttcagtatttaaaggggaaaagtgggctggagggcaaatgggagagtaatgtgtccatgtgtaataaaatccatatatgtaatgtatcccaaatgtatccatatgtaattcacatattcctacagaaaaggagcaggtagggggatagtcaattatgtattcgtctggcgcccagtaaatggtcactttccataagataaagtgaacacagggtaggtacctatggagcttttttttttttttttgagatggagtctcgctctggcgcccaagctggagggcagtggcaggatctcggctcactgcaagctccgcctcccgggttcaggccattctcctgcttcagcctccccagtagctgagactacaggcgcctgcaaacacgcccagctaattttttttttttgtattttttttttgtatttttagtagagacggggtttcactgcgttagccaggacggtctccatctcctgacctcgtgatctgcccgtctcggcctcccaaagtgctgagattacaggcgtgagccaccgcacccggcagattttttttttttttttctttgagatggagtctagctctgtcaccaggctgaagtgcagtggcgcaatctcggctcactgcaacctccgcctcctgggttcaagcgattctcctgcctcagccttctgagtagctgggactacaggcatgtgccaccaggcccagctaatttttttttttttttcatggagatggggtctcaggcttttgtctcgaacccctgggccaagtgatcctccaacctcagcctcctgagcagctagttcttttctagtgtaatatattatcttacggaatatattccattgtctgcatggaccccagttggtttattcacccatctacttagtgacatcttggttatttcaaagctgacatggtaggtattactggtcgccttacaggggaacagcaggacatctgtagtgtgtggtgaacactagagggagcaagaaccccctttctctatcaggtgggtgttacccatttcccagctgcactaatctgtcgttccttgtagaggcctgatctggtgtttgccctgaatgagagatgatctggaaaccatttgtgggaaaattaagttagacatccttccattgaaataaaatgcaggggccgggcacagtggctcacgcctgtaatcccagcactttgggaggccaagtcgggctgatcacctgaggtcaggagttcgagaccagccaggccaacatgactaatttttttgtattttcagtagagacggggtttcaccgtgttagccaggatggtcttaatctcctgaccttgtgatccgcccgcctcggcctctcaaagtgctgggattacaggcgtgagccaccgtgcccagccttgcagcaaataattacatgaaaaaataattaatttaaattctggcaagttctttgaatcaaaaccagggagaggtgctctgctctaataacccagctcttgtggatgttattcatgctaaaacttgtaggattttccattgcttgagttctgctgtagtgttattgcttatcagtgtaggatctgtgctctgtggattggtttaaactttactcgtgggacagctggctttgaaaagttttcatcatcccctgcagggactgcactggtctttgttgaggcacatctaatgttgatagctctgtttcctcccagctggggctccaatctgtgaccttgcttaggtagtgatgctctgaaaagtctccctatttcttctgagaacagttagatattgggtgtaggcttttgaaataatatgataggcctcactctgtaggggtttttacaaaagccactataggctggacgtggtggctcacactgtaatcccagcacattgggaggctgagatgggaggattgcttgagacgaggagtttgagaccaggagtttaagaccagcctggtcaacatagtgacacctccatctctttaaaattgttgtttaattatataaaagccactgtagagtttgaatgctttcaaaatatcaagaggatgaccacaatgaagtaaactgtcacggtggggcacagtgcctcatgcctgtaatcccagcactttgggaggctaatgtggatggatcccttgagctatgagtttgagactgacctgggcaacatagggagaccccatctctactaaaaatatgaaaaatttagtaaaaaccctgtctctactaaaaatacaaaaattagccagatgtgctggcatgtgcctgtagtcccagatactggggaggctgaggtgagagaatcacttgaacctgggaggcagaggttgcaatgagctgagatcatgccactgaactccagcctgggcaacagagcaagactccctctcaataaataaataaataaataaacaaataaataaataaatactaaaataaaatatagccagggcacagtggctcgcacctgtaatcccagcactttgggaggccgaggtgggcagatcatgaggtcaggcgttcgagaccagcctggccaacatggtgaaaccccatctctactaaagatacaaaaagttaggcatggtggtgggtgtctgtaatcccagttactccggaggctgaggcaggagaatcgcttgaacctgggaggcagaggttgccgtgaactgagatcgcgccactgcactccagcctgggtgacagaccaagactccctctaaaaaaaaaaaaattacctgagtgaggtagtgtgctcctgtagtcccagctacttgggaggctgaggtggaggatcacctgagccccgcaggttgactccatagtgagccatgatcatctcactgcactccagcctagttgaacagtgagactctgtctcaaaaaaaaaataaaaataaaaaaaaagagggagaggctgggtgtggtggttcatgcctgtaatcccagcactttgggaggccgaggcaggtggatcacgaggtctggagatcaagaccatcctggctaacacggtgaaaccctgtctctactaaaaatacaaaaaattagctgggcgtggtggcacgtgcctgtagtcccagctactcgggaggctgaggcaggagaatcacttgaacctgggaggtggaggttgcagtgagctgagatcgcgcccttgcactccagcctgggtgacagagcgaggccccatctcgaaaaaaaaaagagggagagataacatgtcacacccatgagaatagctagtaaaacaaaacaaggctgggtgctgtggctcatgcctgtaatcccagcactttcagaggccaaggcaagaggaccacttgaggccaggattttgacaccttcctgggccagagagcgagatcctatctctaaacaaaaaaaaatatttttttttttgaaatggggtctcactctgtcgcccatgctggagtgcagtggtgcgatctcagctcactgtaacctctgcctcctggattcaagcgattcttgtgcctcagcctcgcaagtagctgggattacagatgtgtgccaccatacctggctagtgttttgggttttttttttttttttgcttttttttgagacacagtctcattctgtcgcccaggctggagagcagtggcgtgatctcagctcactgcaacctctgccccctggattcaagcgattcttgtgtctcagtctccaaagtagctgggattacagacgtgtgccaacatggccggctagtgttttgtttgttttgttttgtttcgttttgagacagagtctcattctgtcacccaggctggagtgcaatggcatggtatcagctcactgcaacctccacctcctgggttcaagcaattctcctgcctcagcctcctgaatagctgggattacaggcacacaccaccacacctggctaatttttgtatttttagacagacggggtttcaccatgtagaccaggctggtctcgaactcctgacctcaggtgatccgcctgccttgtcctcccaaagtgctgggattatgggcataagccactgtgccagaccaaaaaaaattttttttaattagctaggtgtggtggcgcatgcctgtggtcccagctattcaggaggctgaggcgggagaaccatttgagcccaagaagttgaggctgtggtgagctttttttttcatttttggagaccttccaaaaaagaaaaaaaaaaagctcctttaatgcagatgtttgctatcagctaatggccatttgcctctgtctttttcaatttgcgccctgctgctttccacaaaggttgcaccattttacattcttaccaatcatgctgcacagcactccgagttctctatgtcttcacccatacttgttattttctgttgtgttttgtttgggtgtgaagtggtatctcattgtggtcttgatttgcatttccctaatgataagcgatgttaagaaaatatttcttatttaaaaatgctttctttttttttgtttgagacagtctcgctctgtcgcccaggctggagtgcagtggcgtgatctcggttcactgcaacctcagtctcctgggttcaagtgattctcctgcctcagtctcccgagtagctgggattacaggtgcccgccaccacgcccggctaatttttgcatttttagtacagacagggtttcactgcattggccaggctggtctcaaactcctgacctcaggcgatccactggcctcagcctcccaaaatgctgggaatacaggtgtgagccaccatgctcgcccaaaaatattttaaggtgaaggctgggtgcagtggctcaagcctctaatcccagcactttgggaggccaaggggtggggggggggggtgggtcacctgaggtcaggagttcgacaccagcctggccaacatggtgaaactccgtctctactaaaaatacaaaattagctgggcatggtgcacacttctctagtcccagctacccaggaggctgaggcaggagaatcgctggaacctaggaggcagaggtgccagtgagccaagattgcgccactgcactccagcctgggtgacagagtgagtctccgtctcaaagaaaaagaaaaaagaaaaatggaccaggcgccgtggctcatacatgtaattccagcattttgggaggccgaggtgggcagatgacttgaggtcaggagttcgagaccagcctggccaacatggtgaaaccccatctctactaaaaatagaaaaaatttgccgggcatggtggcaggcacctgtaatcgcaggtactcgggaggctgaggcaggagaatcacttgaacccaggagacggaggttgcagtgagtcaagattgtgccactacagtccaacctaggtgacagagcaaatctctgtctcaaaaaaaaaaaaaaaaacaactccgggcacggtggctcacacctgtaatcccagcactttgggaggccaaggcgggctgatcacgaggtcaggagatcgagaccatcctggctaacacggtgaaaccccatctctactaaaaatacaaaaaattagccgggcatggtggcgggtgcctgtagtcccagctactcgggaggctgaggcaggagaatggtgtgaacccgggaggcagagcttgcagtgagccaagatccgccattgcactccagcctgggtgacagagcgagactccgtctcaaacacacacacacagacacacacacacacacacaaagaaaaatcaattaaattaaatgttttgttttgtccactggttctcaagcaggggaaattttgacctccctggaaatatttcacaatatctggagacatttctagttgtcagaactggaggaggggtgttactgggactaatgagctgctaaacattctaccatgtacaggaaatccccctcaaccaagaagtaactaagccaaaatgcctataatgccaacattaaaattcctggaatagctcttttagttcgcagcaggagggtagactacacaacctggtttgctatcagatcaaacaaacaaaaatcttcataatcagaaattaaaatatttggccagacacggtggctcaggcctgtaatctcagcactttgagagtctgaggcaggaggatcacttaagctgaggaatttgagaccagcctggacagcataatgagacccctctctacaagaaaattaagaaaaaaggctgggcacagtgcctcacgcctctaatcccagcactttggcaggctgaggcaggcggatcacctgaggtcaggagtttgacatcaacctggccaacatggcaaaaccctgtctctactgaaaatacaaaaattagccgggtatggtggggggcaccaaataatcccacctacttggaggccgaggcaggagaaccacttgaacctgagacacagtggttgcagtgagccactgcactccagcctgggtaacagaatgagactccatcccaaaaaagaaaaaaagaaaattaagaaaaaaaaaatgtcattaacattccagtactggccgggcctggtggctcatgcctgtaatcccatcactttggaaggccgaggtatagatataaggatcacctgaggtcaggagttcgagaccagcctggtcaacatggtgacaccttgtctctactaaaaatacaaaaattagccaggcgtggtggtgggcacctgtaatcccagttactctgggggctgaggcaggagaatcgctggagcctgggaggcacaggttgcggtgagacgagatcacaccattgtactccagtgtgggtgaaagagtgagaccctacatcaaaaaaaaaaaaaaaaaaaaaaaaaaaaaaaggccaggcgcagtggctcatgcctgcaatcccagcactttcagaggccgaggcgggcagatcacaaggtcaggagattgagaccatcctggctaacacggtgaaaccctgtcttttctaaaaatacaaaaaattagccaggcgtggtggcaggcgcctgtagtcccagctactcaggaggctgaggcaggagaatggcgtgaacccaggaggtggagcttgcagtaaaccaagattgcaccactgtactccagcctgggtgacagagcgagactccatctcaaaaaaaaaaaaaaaaaaggaaaaccagatttggcaccccaaaagaacagcttttcttccaagtgaggcctcttggcagtaattcccacgcctgctggctgactcactgccacctggtgccttcctaattccattctgtcacgtggaacacgaaactaatctcagaaggtcccacgatgtgagtccatgacaagcacctccgcgtcccctcgctttggaaatagcccagaaatacagaagccatatatatttttcttttttctatttgagacacaatctcactctgtcgcccaggctggagtgccatggtgcgatctcggctcactgcaacctctgcctcctgggttcaagtgattcttatgtttcagcctcccgagtagctgggactacaggcacgctgccaccatgccagctaatttctgtatttttagcagagacgggatttcaccatgttggccaggctggtctcgaactcctaacctcgggtgatctgcccacctcagcctcccaaagttctaggattacaggcttgagcccccacacctggcccagaatccatgttcttaatcagatgaaatcagtctcttaaatttcccagggcgacccgatcagcagtcaattctcagttaactggggctgattcttttcgtttgaagatttctcacatctctcagctggcacctgaaactgatcacaaggacctaggcagagttcagtggtggatagctgggtggcctggagtattgctgtttatgactttttaaaaaattctgcaggctgggtgcagtggctcacacctgtaatcccagcactttgggagggcaaggcaggtggatcacctgaggtcaggagtctgagaccagcctgaccaacatggtgaaaccccatctctactaataatacaaaaattatctcggtgtggtggcacgtgtctgtaatcccagctactcaggaggctgaggcaggagaatcgcttgaacctgggaggtggagggtgcagtgagccaagatctcgacactgcactccagcctgggcgacagagtgagactctgtctcaaaaaacaagaaacaaacaaacaaaaaaattgtggtaaagctgggcatggtggctcacgcctataaaatcccagcactttgggaggccaaggcaggcggatcacctgaggtcaggagttcgagaccagcctggccaacatggtgaaaccttgtctcttctaaaaatacaaaaaaaaaaaaaaaaaagctctgtcattgtggcatgcacctgtaatcccagctactcgggaggctgaggcaggagagtagcttgaacccgggaggtggaggttgcagtgagctgagattgcgccactgcactccagcctgggcgacagggcaagactccgtctcacaaaaacaaaaaaaaaaaaaaaaagaagaaggccgggcgcagtggttcaggcctgtaatcccagcactttgggaggcagaggcgggcagatcacgaggtcaggagatcgagaccatcctcgctaatatggtgaaaccccgtctctactaaaaaaaaaaaatacaaaaagattacccgggtgtgtggtgggcgcctctagtcccaggtactcaggaggctgaggcaggagaatggcgtgaacccgggaggcagagcttgcagtgagccaagatcgcgccactgcactccatcctgggcgacagagtgagactccatctcaggaaaaaaaaaaaaaaaaaggctgggtacggtggctcatgtctgtaatcctagcactttgggaggccaaggcaggaggaccacttgagcccaggtgtttgagaccagcctgggcaacatagcaagatgtatctctaaaaaaaaaagttcaaaaattagctgggtgtgctggcaccaacctgtagtgggaggctgaagtaggaggatcacctgacccctgggaggttgaggcttcagtgagccatgatcacaccatgacattccagcttgggcaacagagtgagaacctgtgccaaaaaaaaaaaaaaaaaaaaagagaaaaaaattgtggtaaaatacacattacataaaatttcccttttctttgagacagggtcacactccattgtccaggctggagtgcagtggcacaaccttggcttgctgcaacctctgccacccatgttcaagtgattctggtgcctcagcttcccgagtagctgggactacaggcatgtaccaccacacctggctaatttttgattttttttttttttggtagtgatggagtatttttggtagagacaggttcttttgggtatttttggtagagatggggttttactatgttggccagcctagcctcaagtgatctgctcacctcggcctaccaaagtgctgggattacaggggtgagccatcgtggccagaccaattttttatttttagttgaaaaaaggtcttcctctgttgcccaggctggtcttgaactcctgggctcaagtgatccccccacccgggcctcccaaagtgctgagattacagatatgagccaccatgcctagccttattttatttttaacagtagctctcctaatggtgtgaggtggctgccacttctgaatttttttttttttttttgagacagagtctcgctctgttgcccaggctggagtgcagtggcacgatctcagctcactgcagtttctgcctcctgggttcaagcaattctcatgcctcagcctcccaagtagctataaccacatctggctaatttttgaatttctagtagagatgggttttcaccattttggccaggctggtctcaaactccttgcctcaagtcatctgcccccgtaggcttcctaaagttgtcacttatgattttttttttgagacggagtctcgctctgtcgccaggctggagtgcagtggcgcgatcttggctcactgcaagctcagcctccgcctctgcctcagcctcccaaatagctggaactacaggcccaagccaccacacccagctaatttttgtatttttagtagagatggagtttcagcatgttggccagaatagtctcgatctcttgaccttgtgatccatctgcctcggcctcccaaagtgctgggattacaagcatgagccaccgtgcccagccttttctttttttttttttgagacggagtctctttctgtcgcccaggctggagtgcagtggcacaatcttggctcactgcaagctccgcctcccgggttcaggccattctcctgcttcagcctccccagtagctgagactacaggcgcccgccaccatgcctggctaattttttgtatttttagtagagacggggtttcactgtgttagccaggatggtctcgatctcctgacctcgtgatccgcccgcctctgcctcccaaagttctggcattacaggcgtgaaccactgcgcccggctagcctttttcttttttaattgagatggagtttagctcttgttgcctaggctggagtgcaatggcgcaatctaggctcactgcaacctctgcctcctgggttcaagcaattctcctgcctcagcctcctgagtagctgggattacaggcatctgccaccatgcccagctaatttatttatttttagtaaagacggggtttcttcatgttggtcaggctggtctcaagctcccgacctcacgtgagccacccgccttggcttcccaaagtgctgggattacacacttgagccaccgcgcgcctggccgatttttttttttttttttttgagatggagtcccattttgtcgcccaggctggagtgcaatggcacgacctcggctcactgcaacctctacttcccaggttcaagcgatcctctttcctcagcctccagaatagctagactacaggtgtgtgccaccacatctggctaatttttgtattttttttttagtagaggcggggtttcaccatattggccaggctggtctcacactcctgatcttgtgatctgtgtgccttggcctcccaaagtgctgggactagaggcgtgagccactgcacccggcctacacttacgatttttaagaggctgttgctgtcttctgttttcagagaagtgcatttcaagtttacaaaattgcctagcatggtggctcatacctttaatcccagcactttgggaggctgaggtgagaggattgcttgagctcaggagatcaagaccagcctgggcaacatggtgaaacttcatctctacaaaaaataaaaaaaattaaccaggtgtggaggtgcgcaccagtagccccagctactcaggaggctgaggcgagaggatggcttgagctctggaggttgatgctacagtgaaccatgattgtgctactgcactccagcctgggtgtgaccaagtgagaccttgcctcaaaaagtaactaactacctacctaattaaatgtttacaaagtcactagaagaatttgtgtgcagccccagggaaaagtaatagctggataagcccagaacagcaaaatgctttttctgagagaagcagacctgctgaggcccagactcactcttctcagactgagagcacatctgcaggtgatgtttgggaaaccccggcttggcttgccttgggacacttccagtagctccagttcagggttggaaaacctgttctgccactgtcttgtggatgccactcccaggtttatatatttatttattttttgatggactttcactcagtcacccaggcaggagcggagtggcataatctcagtcactgcaacctccgcctcccaggctggagagattctcctgtctcagcctcccgagtaaaactgggaccacaggtgcccgccgccaagacttgctaatttctgtgtttttagtagagacagggttttcccatgttggccaggctggtttcaaactcctggcctcaagtgatctgcccgcctcagcctcccaaagtgctaggattacaggaatgagccaccacgcccagcgcaatcttaggtggattttctccattttacttgtactcgtgtgtgtgtgtgtgtgtgtgtgtgcgcgcgcgcgcgcgtgtgtagtaaattgtatacaatttgcttcctatgtaggtttgcatattcacgcccacattcaaaatactgatcatggctgaggcgagtgggtcacttgaggtcaggagtttgagatccaccaggccaacatggtaaaactcaatccctactagaaatacaaaaattagccgggcgtggtggtgggctcctgcaatctcggctatttgggaggctgaggcaggagaattgcttgaacccaggaggtggaggttgcagtgagccaagattgcaccactatactccagcctgggagacacagcgagactccatctcaaaacaaatcaaatcaaaacaaaacaaaacaaaaaaatttaatcagatagtatgtaacatttttgagattggcttcccctccccggttcccgcccaaagcataattccctagagattcattcatctcgcctgggtgccgtggttcacgcctgtaatcccagcactttgggaggccgaggcgggcagatcacgaggtcaggagattgagaccatcctggctaacacggtgaaaccccgtctctactaaaaatacaaaaaattagccaggcgtggtggcaggtgcctgtagtcccagctactcaggaggctgaggcaggagaatggcgtgaacacaggagacagagcttgcagtgagccgagatcccgctgctgcactccagcctgggcgacagagcaagactccgtctcaaataaaaaaaaaaaaaaagagagattcattcatctcatctgttgtgcatctcaatagtttattcctttttatttatttttttgagactgggtcttgctctgtggccctggctggagtgcagtgatgaaatcatgactcacacagccttgatctcctggcctcaagtgattctctctcctcagccttccgagtagctgggactataggcatgtgctgccacgcctcgcttatttttaaaagttttctagagatactgtctccctatgttggccaggctggtctaaaactcttgggctcaggcgatcctcctaccttggcctccaaaaatgctgggaatacaggcatgagccaccgcacccagtttggtgattactcttggtggagacccaaagtgccatcattcagagccagaatcttagaagagcttaataaattcaacttaagataaaacaatatagctaaaataaaacacctacaaaatttctaacaaatgtgggcagtcaggtttccatatgtagttggtagaagtgggatgcttagtataaacatgatgtgaaatgctggggatttcctgaattgtgttaaaaccacagctactggataaaataaagctattgccctgagtttctgtcttggaagaactgttttctgcatcgtacatctcactgctaggtttacggaaatcacctttttttttttttttgagacagagtctccctctgtcacaaggctggagtgcagtggggcgatcttggctcactgcaacctcacttctgcctcctgggttcaagcgattctcctgcctcagcctcccgagtagctgggattacagatgcccgccaccacgcccagctaatttttctacttttagtagagacagggtttcaccatggtggccaggatggtctcgatctcttgacctcgtgatctgcccgcctcggcctcccaaagtgctgggattacaggcctgagccctgccaattccttttttttttggagatacagtcttgctctgtcgccctagctggagcgcaatggtgcgatctcagctcactgcaacctctgcctctggggtttaagcgattctcctgcttcagcgttctgagaagctgggattacaggcatgcgccaccacgccggccaatttttgtattttttgtagagacaggatttcaccatgttggtcaagctggccttgaactcctgaccgtgtgatctgcccgccttggcctcccaaagtgctgagattacaagtgtgagccaccgcgcctgacctctttcttttttttctctttgagacagggtctcctctatcaccaggctagagagccttctgggctcaggtgattctcctgcctcagcctccggagtagctctgattacaggtgctcaccaccatgccatgctaatttttgtatttttagtagagatggggtctcgccatgttgcccaggctggtcttgaactcctgggctcaagcaatctgcccgtctcagactcccaaaataccaggattacaggtgtgagccactgtgcccaggcacaagaggtcatttttgatgaataaatgcacattttgttaactaatgagtgatttcatattccaaggaagatctggagatattactgaaaaggtgtttaacttgcagtggcaactgaagtcaatgtattttacattttcatgttctggacttgggtgagttgttatttcaagccctcatctttgagtaaaagagaagaatccacctgtaatcccagccactcaggaggctgaggtaggagaatctcttgaacctgggaggtgggaggtggaggttgcagtgagccaagattgagccactgcactccagcctgggtgacagggcaagactccgtctcaaaaaacaaaaaaaaaaaaaaaaaagaagaaggccgggcgcagtggctcatgtctgtaatcccagcactttgggaggccaaggtgggcagataacgaggtcaggagatcgagaccatcctggctaacacggtgaaaccccgtctctactaaaaatacaaaaaattagcctggcgtggtggcgggcacctgtagtcccagctactcaggaggctgaggcaggagaatggcgtgaacctgggaggcggagcttgcagttagcggaaattgcgccaaaaaaaaaaaaaaaaaaatccattctcctctgggatgattcccctcccccacttcccgttccctcctctcccctcccctcccctgccctgccctctcctccccttcttttttttttttttttgagatggagtctctgtcgcccaggctagagtgcagtggtgtgatcttggctcactgcaaccttcgcctcctgggttcaagcgattctcctacctcagcctcccgagtagctgggactacaggtgcttgacaccacacctggctaatttttgtattttaatagagacggggtctctcttttttttttttttttagagacagactctcgctctgtcgcccaggctggagtgcagtggcgggatctcagctcactgcaagctgtgcctcccgggttcacgccattctcctgcctcagcctcctgagtagctgggactacaggcgcctgccactacgcctggctaatttttttgtatttttagtagagacggggtttcactgtgttagccaggatggtctcgatctcctgacctcgtgatctgcccgcctcggcctcccaaagtgctgggattacaggtgtgagccactgcgcccagctgagacggggtttcaccatattgaccaggtctcgaactccatattgaccttgcgatcccagagaaagtgctgggattacaggcgtgagccaccgtgcctggttgagacagggtttcaccatattgacctggtctcgagctcctgaccttgtgatttgcctgcctcggcctcctaaagtgctggaattacaggcgtgagccactgcgcccagcctgtagatgttttttttttaaagtctggaagccaagggtgtcaatgcagacatggggccaaggtcccaggggcagttcattattaagaactgtgctcttaattgagacacctggcaaattttgtattgctttgtagagatggggtttcacaatgttacccaagctggtcttgaacgcctgtcctcaagtgatctgccagcctgggcctcccaaagtactgccattataggcatgcatgagctaccacaaccggcctgtttttcttttttgagacggagtttcgctcttgttgcccaggctggagtgcaacggcatgatctcagctcaccgcaacctctgcccgctgggttcaagcgattctcttgcctcagcctcccaagtagctgggattacaggcatgcaccaccacacccggctaattttgtatttttttagtagagacagggtttctccacgtcggtcaggctagtcctgaactcctgacctcaggtgatccgcctgcctcggcctcccaagtgctgggattacaggcgtgaggcaccgcgcctggcccggcctgtttttctttacactattgcatattagtgtgattagcataaaagacaattagagaacagtcataccatccactccatgggcagcaaccctgcctcctccatgcattgctgcagggtattcctagctcaatgcttagcatttggagagagcataagaaatactatttggccgggcgccttggctcacgcctgtaatcccagcactttgggaggctgaggtgggaggatcacctgagcccaggagtttgaaaccagcctggacgacatagtgtgactgtctctacaaaaaattttaagaaaattagctgagtgtggtgtcccacccttgtagtccaagctactcgggaggctgaggcaggaggatcgcttgagcccaggaggtcgaggctacagtgagtactgatcgtgccaccgcagtccaggctggatgacccagcaagcctgtgtctcaaaaacaaaaacaaaaaaacaaaaaaataactacttgaatgaatgaggaatcgagttcagatcccacttctacttgctcacttactgtgcactattcaataacactagctgaggatcagagagctagcaggtgggctacctgctgtcatgattcctcataaccaaacagtggaagtgggagccattattgtttctggtgggttttttttgttttgtcttgttttgtttttgagacggaatctccctctgtcaccaggctggagtatagtggcacgctcgactcactgcaacctccgcctcctgggttcatgcaattctgcctcagcctcctgagtagctggcactacaggcacgcgccaccacagccagctaatttttgtatttttagtagagatggtgtttcaccacattggccaggatggtctcaatctcttgacctcatgatccacctgccttggcctcccaaagtgttgggattacagacgtgagccactgggcccagcattttttttttttttttttttttttgagatggagttttactctcgtcacccaggctggagcgcaatgacatgatcttggctcactgtaacctccacctcctgggttcaagaaattctcctgcctcagcctgccgagtagctgtgattacaggcacctgccactatgcctggctaattaatttttttgtatttttagtagaaacggggtttcaccatgttggccaggctggtctcgaactccttacctcaggtcatctgcccaccttggcttccgaaagtgctgggattacagatgtcagccaccgcacccagccttattgtttgtttcacaggtgaagaaagtgaggtgtagatgctctggtaaacctgcctggtattacccatgcatcacccaggtagtagaaatggagtcgtgttttaaacccaggtccttctggggcctggcttggtggctcatgcctgtaatcccagtgcactgggaggctgagccaggaggactgcttgagcccagtagtttgagaccagcttgggtaacacagcagacctcagctctacagaacataacagacaaaaaaaaaaaaaaaaaaaaaaagctggtggtggtggcatgtacctgtagtcacagctatttgggaggctgaggtggatcccttgagtccaggagtttgaggctgcactgagctgtggttacaccattgcactccagcctgggttacagagcaagaccctgtctctaataaaacaaacaattaaacaaaaacccacccaggtgaggtggctcacgcctgtaatcccaacactttgggaggctgaggtgggcggatcacttgaggtcaggagttaaaaaccagcctggccaacatggtgaaactctgtctcaactaaaaatacaaaaattagccgggcgtggtggcggacgcctgtagtcccagttactcgggaggctgaggcaggagaatcgcttgaatctgggaggcagaagttgcagtgagctgagatcgtgccacctcactccagcctgggcaatggagtaagactccgtctcaaaacaaacaaacaaacaaacaaacaaacaaacaaacacacaaaaaagaaaacacacagaagaggccaagaggctcagggccttcactctcggaggaaggtttctctctttcaccaccagcctgtatgcattcaaacgtgttctttgcaacgacgacttccgtggctgccctatttaaaatgtccatgatcctcccagtgttcacctcacactgtactatttattttttttgagacggaatttcactcttgttgcccaggctggagtgcaatagtacgatctcggctcactacaatctccacctcctgggctcaagcgattctcctgcctcagcctcccgagtagctgtgactacaggcgtgtgccaccacgcccggctaattttttgtatttttagtaaagacggggtttcaccgtgttagccaggatagtctcatctcctgacctcatgatccaccagcctaggcctccctaagtgctgggattacaggcatgagctaccgcgcccggctaatttttgtatttttaatagagacgggtttcaccatggtggtcaggctcgtttctaactcccgacctcaggtgatccggccgcctcggcctcccaaagtgctggattacaggcgtgagccaccaagtccggcctctcatactgcactattttgcttattaatcttgcttcttgtcctccttccccactagaccgagggctccacggcggctgggacacagtagcagatcaataaatatttgctaagctaattaatggcacttgggaagttttgcagagaaggcggccacggtcgggccccgccttgcctccccaaataggcctcgccgccccaggtcagggatcaaagcggttcccaggcgcgcccttggcccgcgggaaaccactgcccggtcttggtccaggcggcccgtcctacggtccagggttcctatttccgagcctcagggacctcctttccccacggaccccacggccaccgggatcccattctccagttgccccatcgtcaccgcggccgccgccaccgccgccgcagtggcgtccgctctgcgcatgctccggggcgtcaagacgcgaggcgtgcagaaggcgaagcgtgcgcaggcgcggggccatcgcggcccgagtggggcggtgcatcggacgcgcgtgcttcctccgggccacgcccacccccgtccgcccagggacgggcgcgcacgcgcgccgggagcggaagggcgggctggcgcgcgcacgaggccgggcaggcggcggaagctggagaggccgccgcggtgctgagggggaggggagccggcgagcgcgcgcgcagcgggggcgcgggtggcgcgcgtgtgtgtgaagggggggcggtggccgaggcgggcgggcgcgcgcgcgaggcttcccctcgtttggcggcggcggcggcttctttgtttcgtgaagagaagcgagacgcccattctgcccccggccccgcgcggaggggcgggggaggcgccgggaagtcgacggcgccggcggctcctggtaaggaacgcgggccgcgggggcagcgcggcgcggggccggggagggcggtttgaatggagccggggcgccgaggggggagggggctgccggcgcgccctgtgcggggccggggtacggcggcgcccgagggtcaagaagcccagccggcagccgcgcgcgtggggaaggccacagtgtcgcgaggccgtggcagcggcggcccccgcggagcggcggggtgggtggggggcccgggccgcgtggaggccgcgcgatcctctccgcgcgcgctctcgccggggtcgccggacaaagctcgcccccctcgcccggcacccctacagtcgccctcccaattacagcggctgcaacaataggcaggcgttggggcttttctggctgcgtggtaacgggtccgacccgaatgttgcgtttttggcgaagctgcgatcggggctcagccaaacctccagatatgtccggcgtcggccggacacgggcattagcggtccccttgggctagccgacctcaaattgtcttaaaaacgtgtcattccagattttcaaggaaaggtaaaggactcccccgatgccttgcagttagtgacttcaaaatgtttgcccgaattggggttggggatggggtcggcggcaagtaggggagcacggaggaaatcctttgctgtgtaaaagcattgcttttcttttgcatccttttttctccttcccaattggtttttcagattaaggcttttattttcaacgtggaccttttgggcgagtgttttgtcccgatcttgaagataccagtcttgattttttttttttttttttttggtcagtgactccttggggaaagtagcaagggaataagcggaaaagccgcttcgcaggaatttgaagcaagttttcagtttggattgataggctgcattcaagcttgattcctggtgctgtcagtcacttagcacactgtcactttagggaagtggcttaacctctctgaacctcttagttttcctcctttgtgaaagctcctttgtgaaagggggtaatctcccaaatggaattggtgaaagcctgtaaaatggttcctcgcaagcgggaagcactattgtaattgtctggtccaatctccctcattgttcagcagataacttcttgaggccctactaagtgttggatggtcgggggttggatcctggagcctctgcagtcttggaggggagcgggtggtaaatgtgggaacaaactctcttggcctatcgtttattgctctgaacctgcactgtgagagggacacagcggacaggcaggggatcggtggtagccagagatcacgggggctgcttggaagagggggcctcaaaatcagggagggtgtgtaggattgtattttgtttttgaggcagagtcttgcctgtcgcccaggctggagttcagagtcccaatctccgctcactgtaacctccgcctcctgggttcaagcgattctcctgcctcagcctcctgagtagctgggactacaggcgcccgccaccacgcctggctaatttttgtatttttagtagatatggggttttaccatgttggccaggctggtctcaaactcctgacttaaggtgatccacccacctcggcctcccaaagtgctaggactacatgtgtgagccactgcgccaggattgtattttgactttccctggccacctcggactagccattgttcccctcagctacattcatacatcaacttggtcctttccggtgtagctgtcacccccagcaccgtgagagctggggttgtgtctgcctggctggccccacagtaccctgggcctgacacatagtaggtctttagcgaacttatgtggattgaatgagggggtcctgtggaagatcgcgtgaccatctgtgtaaaaggcttggtgcagggccaggtgcagtggctcatacctgaaatcccagcacttggggaggctgaggcgggaaaattgcttgaacccgggagtttgagactaacctgggcaacatagtgagacctcatctctacaaaaaatacaaaaattagccgagtgtggtggcatgcaccggtggtcccaactactcaggaggctgaggtaggaggactgcttgagccagagaggtggaggctgcagtgagccattcttgtgcccctgcattccagcctgtgcaccagagtaagactgtctcaaaaaaaaaaaaaaaaaaaaagaaaaagaaagcttggtgcaggactgggggtggattgtaagggatacaggttagttgtttgaacagtttttgcactttccaagccattgtttcctgaacctcagttgtcctcatctcccctacaaagtgtggggtggtggttagcgtggggtggtggtaaggagtactcattctggaatcagacctcctgaattcacacccagctctctaaatcgtagcttaacctcaagcgaggcgcttagcagtagggccccccacttgtgaaacaggtaggacgaggatgcccgaaacttcacaggcttcttgtgagggttgaatgaggtcacatgggaagccgctaacacactgctgcacctgatgcgtagtgaacacttgattttttttttttttttgagacggagtctcgctctgtcatccgggctggagtgcaatgcccctgtagtcccaagctccttgagaggctggggcaggaggtacaggctgcagtggaccatgattgagccactgcactccagcctgggtgacgaagcgagaccctgtctaaaaaaaggaataaaaattaattcatgcatagttaggaaagtaataaatggttttgcatgggccacctaaaatcattttgtgtccagccctttaggagacgtaaatgttgatcgtgcaggcttttgagcaggggaggtgatgtcatcagaattgtgatatagggcagtgcagtggtctctaaacttcttgtcagtgaggagcattccaacatatgtgtatttatttacaatttatttgtgtacctttgcttctccttgggaaccctcaaaacaccaggagataaccttagaccattccatgttttggctgtttgtgggaggtgggagcatgggagggactagggttttgggcagatgtctggtggaactttctttctttctttcttttttttttgagacggaatcttactcttgttgcccaggctggagtgcaatggcacgatctcgtctcactgcaacctctgcctcccgggttcaagcgattcttctgactcagcctcctgagtagctgggatcacaggtgtgcaccaccacacctggctaagttttgtatttttagtagagatgggatttcatcatgttggccaagctggtcttgaactcctgacctcaactgatccacccaccttggcccttggcctcccaaagtactgggattacaagtatgagccaccgcgcccggcctctttttttttttttcttatgagacagagtcattctgtcgcccaggctggagtgcagtggtgcgatcttgactcactgcaacctccgcctcctggtctcaagcgattctcatgcctcagcctctggagtggatgggactaaggacgtgcaccaccatgcccagctaatttttgtattttagtagagaccgggtttcaccatgttggccagaactcctggtctcgaactcctggcctcctgtaatctgcccacctcggcctcccaaagtgttgggattataggcgtgagccaccgtgcccagccagtctggtggaactttctatcagtaaggaaactgaggcctagggttattttctttccacaagggttgtcaagtcaaccacctgggtttgactcctggttttgtctttccatccctcggtcatcaaggctgccatggcacagaaggacccattcatggtgcctgtagacagaacacaatgtgaatagtgccccctggagttgtgcaagaaatgacccagccactcttccccatttatgtggcgaacaagcatgcattgagcgcctgccatgtgccaggcactgctggggagctggggattccatggggaacaggcagacaagggtcctgttcttagtagctcacaccccactcttgacttgcaaagggggacagtactagtacccagcttgtaggattgctgcaagagctgaacaaccagtgacaaatgcgaagtgcttagaatggtgcctggcacatagtgctaaacagttgttagtgctcatcatttattaggattcctgcaacagcctggtgggatgacacagataatatactttttcctctagtcataagttctgtatgtttcaaagtggtagcaaaggagtcagctcctccattttgtccttaatggctgcacattgtttaacagcagggatgcattctgaggaatgcgttgtgagatgattttgtggttgcgtgaagatgatagagtgtgcttacacacgtctagatggtggagcctagtccacatgtaggctctgtggtatagcctattgttcccaggctatacacctgtacagcatgtcactgtaccgattattgtaggcagttgtgacccgatagtatttgtgtatctaaatatatctaaacagaaaacgtatgggaaaaatacagtattatgatctttaaaaaatttttctaattagacaattcaaggaggaaggtataatcttatgggactattgtatatttggtccatcattgaccaaaatgttatgtggtgaagaaaaccatgctttgaaatttcaccataaggcattggaaaagggagagtgtgtttagtggcatggtttttttttttttttttttttttttttttgaggtgaagtttcgctcttgttgcccaggctggagcacaatgatgcggtcctggctcactgcaacatccgactgcagagttcaagcaattctcctgcctcagcctcccgagtagctgggattacaggtgcccgccaccatgcctggctaattttttgtatatttagtagaaacggggtttcaccatgttgaccaggctggtcttgaacttctgacctcaggtgacccacctgcctcagcctcccaaagtgctgggattacagacgtgagctaccgcgcccggccaggtttttaaaaatatcaaatgttcagccgagtgtggtggctcatgcctgtaattcccacactttgggaggcccagcagggcaaatcacttgatcccaggaatccaagaccagcctgggcagcatggcgaaaccccgtctctacagaaaagttaaaaaattagccaagcatggtgttgcacacctgtagtcccagctacttgggaggttgacgtgggaggatcaagccgaggaggtggaggctgcagtaagctgtgatcgcaccactgcactccaacctgggtgacacaacaagaccctatcttaaaaaagccgggggttgggctgggcgcggtggctcatgcctgtattcctagcactttgggagccgaggcgggcggatcgcctgagctcaggagttcaagaccagcctgggcaacattgtgaaaccccgtctctacgaaaatacaaaagaaattagctgggcatggtggtgtgcgcctgtagtcctagctacttgtgagactgaggcaggagaattgcttgaacccgggaggccaaggttgcagggagccgagatcgtgccgctgcactccagcctgggcgacagagcaagactacgtctctacaaaagaaaaaaaaaaagccgggggttgggaaggataacagctgctggaatactgggggaaggtatgagagggaacaggtcagaatgaagcctgaggctgaatggagcttcaggtgctgccaccctcataggtgtcaaccctaaggagacatagcggactcattagtatgcccagtgatttcttgattgaagttttctgttaactgcatcctaaggacattaatcattaatttttcagggtgtgggattgatgggcatgtgatttgtggcctcaactcttcttcatatatgggaaagggcctggatggaagtgccaggtgtagctgggtttgttgttacagggcagagagaagggacacattgatttccctccaattccctcagggaagggggctttcttgtttttattttattttattttattttattttttgaaatggagtcttgctctctctctgtcgcccaggctggagtgcagtggcacgatctcagctcactgcaagctcccccttccgggttcacgccattctcctgcctcagcctcctgagtagctgggactacaggcgcccgccaccacgcccggctaattttttgtatttttagtagagacggggtttcaccatgttagccaggatggtcttgatctcctgacctcgttatccgtctgcctcagcctcccaaactgctgggattacaggcgtgagccactgcgcccgactggaagggggctttctttagaaaataggtaaatgttagtagggtggaaaccaaccctggcccctttcaaatgtgtggtttttttttttttttttggagacagttgtactcttttctcccaggctggagtgcagcggtgtgatctcggctcactgcaacctctgccttccaggttcaagcaattctcctacctcagcctcctgagtagctgggattacaggcgtgcgccaccatgcccggctaattttgtatttttttttaatttttatttatttatttatttttttgagacggagtcttgcttagttgcccaggctggagtgcaatggcacgatcttggctcactgcaatctccgcctcccgggttcatgccattctcctgcctcagcctcccgagtagctgagactacaggcgcccaccaccatgccctgcgggggtttcaccatgttagccaggatggtcttgatctcctgacctcatgatccgcccgcctcagcctcccaaagtgctgggattacaggcgtgagccactgcgcccggccagtaattttgtatttttagtagagacggggtttctccgtgttggtcaggctggtctcaaacttctgacctcaggtgatccgcctgccttggccttccaaactgctgagattacaggcatgagccaccactcctggcctcaaatgtttttttaagtcccagactggtttccagagctttgcttttggggactctgttacctccctaaaggggcatagcttcatttatgtatgtggacacttgtcactgtgaaccgttttgctctgtgtgcagccagctgtgagtgtgatagagtagcacgggccccgtttttaatagtgatcgactttaaaatggttctttgaggaggtgttttttttttctttccactttttatttttttagagacggagactcgctgtgttacttaggctggtctttaactcctggactcaagtgatcctccagcctccacttcctgactagctgtgattacaggcgtgatccactgtgctagctcttgggagttttttaagttttctctttgccactggcaagtcacgccccagtggctcaggaagcaggtggctgatgtgacagttgctgctcacctgttccagtgggagacttgagggggagggtctgctgtgtgcgacccatcttgctccgaaagtcccagtaaaggggcatagtggatgtctcattgtgcccagggagctgaaactgcccctgtgatgatcaaatgtgattctggcacagcctggactggctgggcacctgaaggccttgcctgcctcctggaggcatctcctgggtgcctgtgggagtggctctttacttgcccttcctcttgactctgcccttcctcgaccttcaaggttctcatcctattccttttgatcctcggcctgaatcagttactcaggccctggagtcaaagagacttgaggcgggattctgttctgcatggcttaacctctttgaactcagaattccgttttcctctcagaatctccctggcctccaccctctacctcaagaaccaggggctgaaccccggccctgcctgtctttgccaagccttgctctagggcttggtcagcctcgaggaaggggggccttgttatgtttatttaaaaatttatgttttaggttttactttcttagaagtggaggtcttgatgttatctcccaggctggtcttgaaccccttggctcaaaggatctgcctacttcagcctcccaaagtgctgggattatgggcgtgagccaccacgcctggcgcctttttatatttctttcttttttttttctttttttgagacagagtttgtctcttgttgcccaggctggagtgcaatggcggggtctcggctcactgaaacctccgcctcctgggttcaagcgattctcctgcctcagcctcccgagtagctgggattacaggcatgcaccaccacacctggctaattttgtatttttagtagagacggggtttctccgtgttggtcaggctggtctcaaactcctgacctcaggtgatccacctgcctcagcctcccgaagtgctgggattacaggcatgagccactgcacctggccccctttttatgtttctaacagcacgtcccagccgagaccctggtgttcacccttgcctcatctcttgccctcacttgcacatccattccatcagcatgtccagagaaattaaagtcattatcagaccgtgccactcccgtgcctggaacattctagcagctccccactgcactggatgctcctggaacccctttactgtggccctcaaggcctgtgacttctcccctatgccccacctgtggccgcacccacttgccctctgaggtatgatatggaatatatttggtctttgcgccacatgtcataggagtgataggtgtgtcttttaaaattcataatgagccccttttgatcacagctgagtttatgcttatgaggtgatttaggatggggctcctagatagcccaggatggggctggttaccagaaagaccaagtgcttagagggtggcatgtacggaggggccattgaagctgtctgtattgcttccatctggttgaccccgagtcgtatccgttataataaaccattaatgggaagtgaagtgcctgccttagttctgggcgctgctttagcaaatcaatcaaatcgaggagggggttgtgggaattcccaatttataggtggctgggcagaagtactggaccctgggatgtgcaaatggcatttgtagtgggagcagtcttatgggacagctctttttcttttagagacagagtgtcactctcacccaggctggagtgcagtgatacagtcatagctcactgcagtgtccagctcctgggctcatgtcatgctcccgagtagctgggactacaggtgtgcaccactgccaggcttagctaatttttaaattttttgtagagacagggtgctatacttcctaggctggtttcaaactcttggcctcaagcagtcctcccactttggcctcccaaagcactgtgcttaggtgagcccactgcatctggccgataaagtccttaacttgtgggagatagagtctgaattgagttaaattgtaggacacccagctggtgtttggagacttggagaattacttggaaaagacccacgcatctggtcacagaattgttctcggttatgagagtatagtagaagaaaactggttttctctgagttggtgtcaaaagtgctgtgtgagagtgtagagaaacggagtgtgggccaggcacggtggctcacgcctgtaatcccagcattttgggaggctgaggcgggtggatcacctgaggtcgggagtttgagaccatcctgaccaacatggagaaacctagtctactaaaaatacaaaattagctgggcgtggtggcgcgtgcctgtaatcccagctacttgagaggctgaggcaggagaatcacttgaacccaggaggcagaggttgcagtgagctgagatcgcaccattgcactctagcctgggcaacaagagtgaaacttcatctcaaagaaaaaaaaaagaaacagagtgtgttttcccaccttccctgctccagccacactggctgacttgctgtgccttggaatatgccaagcacagtccagggcctttgcacttgctgttcctctgtggtagataaataaccacatggtgcccatgtcactacagatctctgctcagacatcttcatcactgaggtgtcccaggctaccatagaaggagtgcttctcatctgttaaccctgcgaaccctgcttgattagatttatagcacttccaccctctatgtgacattgtgtcttttttttttttttttctctttgagacaaggtcttggtctgtcacccagcggggagtacagtggtgcaatcatagctcatggcagtctggaccctcccaccttggcttcccaagtagctgggactacagccgcatgccagctaatttttgtatttttcgtagagacgaggtttcaccgtgttgcccaggctggcctcaaattcctggcctcaagtgatcgacctgcctcaacctcccaaagtgctggaattacaggcgtgagccaccatgcccaccctgaatactttttttttttttttttggaggggggagatggagttttgttcttgtcgcccaggctggagtgcaatggtgcgatcttggctcactccaacctccgcctcccgggttcaagcgatttcaattttcctgcctcagcctcctgagtagctgggattacaggcgtgcaccaccacgcttggctaattttttttttttttttttgagacggagtctcgctctgtcacccaggcttgagtgcagtggcacagtctcagctcactgcaacctccgcctcctgggttcaagcgattctcctgtcccagcccccacaccgagtagctgggattacgggcgcctgccaccatgccggctaatttttgtatttttagtagagatgagttttaaccatgttggccaggctggtctcaaactcctgacctcaagttatccactcgtcttggcctcccaaagtgttggaattacaggcatgagccaccaagcctggtcctaatttttttattattagtagagatggggtttcaccatgttggtcaggctggtctcgaacccctgacctcaggtgatccacctgcctcggcctcccaaagtgttgggattacaggcatgagccaccacgtccggccctgaatacttttttttttttttaatataacacttccactttctatgtgacattgtgtcatgtttggctatttctgtcactctgctgtccactcctccaggtaggaattgtgttgttctctgccagatgcctggtgtttggaaccagcttggtgcattcagcgctgttcgtatttgggggtagtcatcagtaagtcctctgctgtggcggtggggaaggcctgtcacgagtgacactgggcaggtatggattctgcatctccctgcccactcttggcctttgcatgcctctgttgtggggactcctcttgccgtctccacacagtgtcactcctcacgctcagtgttgcgtatatagctgataacacagcagacccggtggtggcgcaggacatccatccagtgggcctcggccagccgaaaagaaagaataggggccgggcacagtggctcacgcctgtaatcccagcactttgggaggccaaagtggacggatcatcggctcaggagtttgagactagcctggccaacatagtgaaaccccatctctacaaaaaatacgaaaattagctgggcatggcggtgtgcgcctgtagttccagctacttgggaggccggggcaggagaattgcttgaacccgggaggccgaggttgcggtgagctgagattgtgccactgcactccagcctgggtgacagagccagagtccatctacaaaaaaaaaaaaaaagaatggggttattgatgttccacagggagcgtgggtcaggatggatttgtgacacttgatgcggttactctgcgtgttatgtttctgctgggtcacattgtcacatggagacatgatcagaagagcttgaaaaacatccatctaattgatagctaggatagcatttgcaggcttgcagtgtagacaccacacgtccctgtggggttagaggacactcccctaaggcagagaaccgtcctggatgcttttaggtcccttgggtaggtgctcttaagcggttttctttttttttttttgagacggagtctcgctgtcacccaggctagagtgcagtgatgcaatcttggctcactgcaagctccgcctaccaggtttacaccattctcctgccttagcctcccgagtagctgggactacaggcccccgccaccacgcccagctaattttttttttttttttttttgagacagagtcttgctctgtcacccaggctggagtgcagtggcatgatcttggctcactgcaagctccgcctcccgggttcacaccattctcctgcctcagcctcccgagtagctgggactacaggcgcctgccaccacgcccggctaattttttgtatttttagtagagacggggtttcaccgtgttagccaggatggtctcgatctcctgaccctcgtgatccacccgccttggcctcccaaagtgctgggattacaggcgtgagccaccgcgcccggcctggaggttttcttatagaccaccgaggggaacattttgttttgtagttcacgcatagtaaacggggctggctctgcggaagccatcctgcccattgctgttgttccgcccaagcctctgccataacctgactcccacgttggtctgctgctgaaatgtgtccgtgaacaaatttccccaagccccaaaaaacacaatagcagatatcctgggaccaaacttaaatataatgctagtttctcatgcaaggtgaaaacaaccaccataattccaacaaacagatttccaagggatccgattgctggttagcaacctgccctgcctggggctggtcaccgcagtgctttaagacaaaagctaggggtggcgtgaaagaagagaccagacctcttctcttcctcaagcagtctccttccacatttgaacgtcaacagatgtttctattttagatgataattttgatgaagttgaaaataatgagaacatggtagttctcacatcctttgatctttctcttttatttccacaaagacacttcctgggcatttcttgtgggtatttatttcatgggtattctgatttaggctttttttttttttcttggaagtttttctttaaaaatctgaatataaaaagtaatagatggctattgtaaaaaataaataaaaagcgccagacatctgtgatatggaaagggtaagttcctcatcacatgccatcagagagagctactggctgtgctgacagcggtttgtgcatgttttctttggggtaatttctatgcatggattaacatgcatatatatatatatatatatatatttttttttttttttttttttttttttttttttttgagacagagtcttgctctattgcctgggctagagagctgtggtgcgatcttggctcaccgcaacctctggctgctgggttcaagtgattctcctgcctctgcctcccaagtagctgtgattacaggtgcccaccaccacgcctagctaacttttgtgtttttgtagagatggggtttcaccacgtttgccaggctggtctcgatctcaggtgatccgctcgcctcagcttccgacagtgctgggattacagctgtgagacaccatgcccagccatatgcatatatagttattcttttttttttttttttttttttgagacagggtctctgtcgctcaggatggagtgcagtggcgtgatcttggctcactgcaacctccgtttcctggttcaagtgattatcgtgcctcagcctcctgagtagctgggactacaggcatgcaccattacccctggctgacttttgtatttttactagagatgggattctgctatgttggccaggctggtcccgaactcttggcctcaggtgatctgccttccttggcctccaaagtgctgggattataggcattaacaccatatccaaccttacttttttttttttttttttgagtgtttctctgttgccaggctggagtgcagtggcgcgatcttggctcactgcaacctccacctcccgggttcaagcgattctcttgcctcagcttcccgaatagctgggactacaggccagctccaccacgcccagctaatttttgtattttagtagagatagggtttcaccatgttggccagggtggtctcaaactcctgaccttgtgatccgcccaccttggcctcgcaaagtgctggaattgtaggcgtgagccaccacgcccagcctctcaattcttttttgatgtgccaagacttctgcagcgtgggttgtgtgggggttctgattgctgggcaattgaggagcttctcaagaaattgaggcaatatggccacaccacttctagaccctttggcccagggaaagggttaacctcctggacttttaactgagtgttttacatcttagcttttagattcttgtgccagagtagtttcacttccggtcattccttctggctgctggcctggattcccaggctctgttttctccttgtggaggccccggcagcacccgatccaagggccgcacacatctggatttggcttccacacgctgtactaactattcttgcccttttggcccctgaatcccctcatcctttgctttttccacctgagtaggtgtggcctcctggtctgcaatggatttcattgctgcgtgaatttcccctgctagtgacttatcattgagggccccattgcaggactctaagcggcaccgtgtaagacaccttagggacgacctttggccaccccaggactttgctgaaaatgccaaatccttcgtttcctgtatagaagggcagggatgattggcgatggggtaagaaggggtagagagagaggtgttccttgtccttagacacctttcctggccgtgctcgtttggccttcccgtgtagacatctcgccggagcaaggtgcacccagccccacaccccatccagcttctacagggctggcctcaccccagcccttcagggagggtgagctggccaggaggaggttgagggctgagaacaacaccatgcttatggctgtgggagcaaggagggataagagatgtttgtgggtcaggcactgtggcttgggctaggtgcggtggctcatgcctgtagtcctagcactttcggaggttgaggtgggcggatcacttgagcccaggtgtttgagaccagcctgggcaacacggcgagacctcatttctataaagaaatacaaaaattagctgggcatagtggcatgagcctgtagtcccagctactcgggaagttgagatgggaggatcacttgagcccagaagttcaaggctgtgagctgtgatggcgccactgcattccagcctgggagacagagcgagaccctgtctcaaaaaaaaaaaaaaaattgggccgggcgtggtgcctctcatctgtaatcctagcactttgggaggccgaggcaggcggattgcctgagctcaggagtttgagaccagcctgggcaacatggcaaaaaccctgtctctactaaaatacaaaaaaattagccaggttcggcagtgtgcgcctgtagtcccagctactcgggaggctgaggcaggagaatcgcttgaacctaggaggcggaggttgcagtgagccaaggtcgcaccactgcgctaagcctgggtgacagagcgagactctgtctccaaaacaaataaataaacaaataacaagaacaaaattcttggcagccggccaaatctgtgtgcattgcttgccagggtgggcgtgtcatggctgacagcaggtcctggatcgcacctaggggtttgctgctctccagccagctgcttctacctgatgcgcgcccaagaggggaagccagtctgttgttcctgagcattgcggggcaggagtgttacctgcggtttgtgctggggggaggctgcgttacggactcgagtttttttttgttttgtttttgttttttttgagatgaactcttgctctgttgcccaggctggagtgcagtggtgtgatctcggctcactgcagcctctgcctctcgggttcaatcaattctcctgccccagcctcccgagtagctggcattacaggcatgcaccaccatacccagctactttttgttttttaagtagatacggggtttcaccaagtcggccaggctggtgttgaacttctcacctcaagtgacccgcccgcctcggcctcccaaagtgctgggattacaggcatgggccaccatgcccagcccatgactcagttttctcatttctgttcagggaaaggagcctctgcttcacattttgatgggagcatctgaggacctcatctgtgtgatgctcctagtgcgatacctttcacgtgctaagcagctgctcagtaaacctggggagagatggggcaccttggtttcaccagctgagcggctggcacttcctgcctgtgagtgatggttcgatgttccagcctgtggaggaggaggtggagccacagggaggttacccgtgaggcaggtggcaccgtggcttcacagtccatgttcagagtgtgggatgcatggcagtgagttccactgtggccttggccttgtgacctgaactcttccacttccctgtcatctgtcagctggccagcaggaccactgtagtccctgtgtggtggtgagggcccagtgcggggagtctcagttgttaccatcaagtaggctgaggcccctacctcctggctagatcttccttccttgccatttctttgtgactgagacatcctcagcagttgtaaatcacagggaggtgaaggcaagccacagtccccgctggatttgcaaatatcccttcccttcctctgtcagcatgaccttacggtagacgaggatttcttaaataggaccccagaaatgttaaacctcaaagaccaaacttgatgaactggccttcattagaattaagagcttctctctctttttttctgtttgttgagatggaggtttactcttattgcccaggctggagtgcaatgatgtaatctcggcttcactgcaacttccacctaccgggttcaagtgattctcctgcctcagcctcctaagtagctgggattataggcatgcacccaccacgcctggctaatttttgtatttttagtagagacgggttttaccattttggtcaggctggtctcgaactcctgacctctgcttgcctcggcctcccaaagtgctgggattacaggtatgagccatcacgcccggccgatactttctactttttaaaagtggataccggccacatatgtggtggctcgtgcctgtaatcccagcacttctggaggctgatgcaggtggatcaggagttcaagaccagcctggccaacatggcgaaaccccgtctctactaaaaatacaaaaaatatatatatatatatattttagccaggtatagtggtgcgtgcctgtaatcccagctactcgggaagctgaggcacgataatcgcttgaacctaggaggcggaggttgcagtgagccgagatcacgccactgcactccagcttgggtgatggagcaagactctgtctctaaataaataaataaatagatagatagatatctcaatagccagtaagcatacagaaaggtgctccgtgccattagttgtgagggacatgcaaatgaagaccataagaagatgcgattggacattggcaacattgttaaaagttgtaaggactgacagcagcaagtgttggggttgatgaagagcacctggaatgctgtccctgtgtgggaggtgggaccgtgtgtgtagatgatacaactattttggaaaactagcaaagctaagtttatgcctccctttataaccaccagtttcattcttggacacccaagaagaaccaatgcatgtgttcaccaaatgactctcatagcagcttgatttgtgctggccagaacctggtagagtacaatgtctatgaaaatgagaatgctcacataaaaagaacggatgactctcccagacatggtgaccctgtgtgattgtcttttttttttttttttgagacagggtctttctctgttgcccacgatcatggctcactgcagccttgacctcctgggctcaaacagttctccctactcagcctcctgagtataagctaatttaaaaaaaaaaacttgtagagacagggtcttgctatgttgcctaggctggtcttgaattcctggactcaagcgatccttctgccttggcctcccaaagtgctgggattataggtatgacccactgcccccaacattatattatttatatgttacatatattatatgttataagtatatattgtatattatataatatatgtattatagacgtgacccaccacacccgtcattttattggaagttcaataacaggtgaaaggaagccacagtgatagtcaaaatagtggtttccctgggagagtggtattgactgggggggcccaagaatgccttctggaacgtcaggagggatgtctgacgcagtgttcttcaagctgttcacctatgatcctgcgatcagggcatgtacaagtcagtgagagtaagcagaatcacacgctgctcccctcagtactgagctgaggacgtggagtcgctccacggctctccactttgtgctgcaagtcggccagtgcttgttcaagtgcaggcaccagcaacctcatcacaggctttggcactgggcgatactgctggggatggctttgcatcactcccgggctgttgggatcccctttactgtcactctgcacgtgtctgagctttcaatccggaaatgaatttgcggatgctggtggcacccgcgttcctgtttcactgcagcctgactctagaggcagcattttcaggaggagaggccattctaacaagcctctgtgaaaccccgtgcttctaaaaagcagacttgccttattcgggcacaaaatggttttttggggcagcatcttcagtgtactctgtttttccgttgacaaagttagcgctgctttgagttggagccgttcctggaggctgtgacggcatcgcatgatttgatggaagggagaggggagaagttctaatgctcagtgtaaagtacgattaggtggcatacgcctgtagtcccagctactcgggaggctgaggcatgagaatcgcttgaaccccggggacggaggttgcagtgagcagagatcatgtcactgcactccagcctgggcgacagagtgagactctgtctcaaaaaaaaaaaaatgtacaatgaggagagctataatttcagtcacttcccagtgtatgctcgttggcttgtccaccttcagagagggaaaagatggtttgccctcaatgacctggatctttttctctttttcctctgagacagcgtctcgcccttttgcccaggctagagtgcagtggtgcggtcatggttcactgcagcctcaacctcctggactcaggtaaccctcccacctcagcctcccaagtagctggggctacaggcatgtgtcaccaagcatggctaatttttgtattttttgtagagatgaggttttgccatgttgcccaggctgatcttgaatttctgggttcaggccatccccctgccttggcctcccaaagtgctgggattacaggcgtgctggattgtattttgctgtcagtttcagtttatttgacttagaataaagaccttcaagtgaggaagaagctataggtccctgaatatcacaggatctatgaagtatgtggcagtcctgctgtcccttttcctacctcattgcaacactctgtggacctgagaagactgtggggacagaaggcccagaggggagcgccaaggagccagtgcctccccctgccctggccgtgcccacgttgctgggcttcccacctatggaggtagctgcaggcgcatcctccctgcagacatacccatggaccagaggcttcaggctccaaaatcagcatcttagtaacataaacgcaaggttcagactgttgtcacatggcagaggccagggcggcatctcataatcagacagatcctgtttctgtagcagaatgtgcgaatatccacacggagcagaatcaggtcagattttgcctccagatgaatttccttgcagtaacacatttaggtttgtttatgtcaggggccatcttttcaggattggctggagtgccagccactggttcctcccctgctgagtttcctggtcctctctcctgctgttagccatgaaagtggaatgaggtcattttgagcctttcatctcttgtctaagaatatatccctatggctgggtgcagtgtctcacacctgtaattccagcactttgggaagtccaggctggaggatcccttgagccaggatcaacaagtgtttgagaccagcctgggcaacatagagagacccctgtctctacaaaaaaattaagaaaaattagccaggcatggtgatgcactcctatggtcccagctactcgggaggctgaggcaggaggacggcttgagcccccgaggtcaaggctgcagtgggctatgatggctccactgcactccagcttgggtgatagagtaagactctgtatacaaaacaaaaacccctacctttcaaattaaaactttttccgctagatcacctaatacaatgtaatttttggccaggaacggtggctcacacctgtaatcccagcacttcgggaggccaaggcgggtggatcacctgaaggtcagacgttcgagaccagcctggccaatgtggtgaaaccccgtctctactaaaaataaaaaaattggcctggcgtggtggttcacacctgtaatcccagcactttgggaggtcgaggcggttgggatcacgaggtcaggagttcaagaccagcctgaataacatggtgaaagcctgtctctattaaaaatacaaaaattagctgggcatggtggtgtgtgcttgtaatcccaactactcaggaggctgaggcaggagaattgcttgaacctgggaggcggaggttgccgtaagccaagatcacgccattgcactccagcctgggcaacaagagtgaaacttcgtctcaaaaacataaataaaacaaaaatagaactttttttttttttttgagacggagtcttgctctgtcgcccaggctggagtgcggtggcacgatctcggctcactgcaagcgccgcctcctgggttcacaccattctcctggctcagcctccccagtagctgggactacaggtgcctgccaccatgcccggctaagctttttttttgtatttttagtagagacagggtttcaccatgttacccaggatggtctcgatctcctgacctcgtgatctgcccgccttggcctcccaaagtgctgggattacaggcgtgagccaccgcgcctggccaaaaaatggaactttttaaatcaagagaattaaaaatgtttctacacttcttacagaatttatccttagaaccagaaatatgccggagagttcaggggcaaagagattcattccaaaaggcagcagaaacaagacagatttgcgacatgcttaaccagagaggggctatcaaaaaacccagggtgtcagagccaggaaatgcagtgtagcttttagaatttgtgttttaaagactattaaatgataagaattgccatgggtaagattatatgaaagcctagaatgtattgagaaatttcactgagtgtgggtgcgtcttcagccagcgagggccttcagccagcgaggcggagaagcctctttacagacacaagtatctttcctttcccatttgtctctgggtggttggaggacatccccttatgcatattagcatctaaaggaaaaggtgacgtttccaagtgtcagggaccaaaaagtgccattatttgtgtaatactttatcctttttaaacttaagttcatttattttaagggaaacttggtcttactactttcaatggaaaaccagcagtatttgccataaatatctgttttggctgaattgatggaatttcggttagaggcttgtttttttttttttttttctgagacagagtgtcgctctattgcccaggcaggagtgcagtggtgcgatccgggctcaccgcgatctccgtctcccaagttcaagcgattctcctgcctcagcctccggagtagctgggaccacaggcgtgtgccaccatgtccagctgattttcgtatttttagtagagatggggttcgccttgttggccagactggtctcgaactcctgacctcaaatgatctgcccgcattggcctcccaaagttctgggattacaggtgtgagccactgcacccggccagtcagaggctatttgagctatagtcctgttctttctgttaggaagataagcaagtggagagcagtgtgaagggtagaccagcaccccctgagacaccctctgccgtgatcaggaatatggcaggagcccctgaaggcccctgtggggcagtgcttgtctgtgagcgtggcccaccccttcctgggtagactgactgatcttgtgtgcctgagatgtaggacttcctctgagagtgatcatggagaaacggtttgggtggctggtggggaaggtactggcttcctgtgggatgtagattctgatgtgaccgtatgattgtcccttgctatccctgtcctgcctcgcccttggtcatgaaccccagactgaccaggactgtcttccagcaggaggccactgtctgcagctcccgtgaagatgtccactccagacccacccctgggcggaactcctcggccaggtccttccccgggccctggcccttcccctggagccatgctgggccctagcccgggtccctcgccgggctccgcccacagcatgatggggcccagcccagggccgccctcagcaggacaccccatccccacccaggggcctggagggtaccctcaggacaacatgcaccagatgcacaaggtagggatccctgtgcccgcctcgcacctgcggcctctgcccactagggctgcaggcagcctctggaccgagggccttacttggaggatggggggaagccttcttgttggaggtgtcctgccttggctcagccccctaccccagggcccacggccatgaacagaaggttcagctcgtcagaccccagcctgtgctggcgcatgatctgggccccgcgggcacctgccccaccgtttcccgctcccttgctttctgcatgtgaaatttgggaatatcactacaaagttttcttttggtaatgaagaaaaacatccaaattcctaaaaaggcttttagccacgtggtttcccccgttctggctgtcaggctcacctgtgcagctcgcagagccgagcagcgggttccctttcctccaaggcgtgcccctcagccactgtctttacctcacctgcgctgagcagggccttcagtcagcaaggtggagaaggctctttatggtcacaagtctcttttgcatgtccctggatgtggttagaggacatattcccttatacatacagcatctgaaaggaaaggtcatattagcatccatgagaaaaggtgacatttctaagtgtcacgggccacaggaggtcccgggtggtagaagatgaggattgcttgaccacagtctcccatatgctcgtgctccactgggcgacatttattttgtgtacctgtctcgaggcctaagtaggtgtcagaaccttgccttggagtcatgctggggactggggagatgcgcgtcatcttcgggtggctgttctcggtgccctcgagcttctctcgggcagcgcatagctgcgctgccacctcacgttccacatgctgaccctgccttgccatggtccctctcgcagcccatggagtccatgcatgagaagggcatgtcggacgacccgcgctacaaccagatgaaaggaatggggatgcggtcagggggccatgctgggatggggcccccgcccagccccatggaccagcactcccaaggtacagaactgcgttccttcctgccttgtgtttgtcatactccagagtcctcagatcattttcctcccctgggttcccacaggatggattcagggagtacctaggatgatgtagccgggtgggtggcccgccacagagagctgtctggcatggcgtggctggtgctctgttctggccacctcgtctcggagcagccctggaaggggaaatgctggttggggggcagaccatgttcagcatgggtgatagaggagggctgtgcagggcagcagccccgtgccacccaggaacttactggaaatacagattcctggggcctgggactctgctttaatgagcccagcaggtgccttttctgtacgaggacaattgagaagtgatatggtgggtgactttccaaggccttgctgtcatcaggggtgggaagctcaggggctgcactgggaatggaagtgttgggggtgggcctggcgagcccgaggatgtggaccccgcctgtggacaggcaggcggaagccgggagagagccgtgatttcatgcacaggttctcagcattaaccagaagcaccttactgagacgtgggccaaaccaaatccaccaggtcggctgctgggctgaggtgccttcagcatgtgccctccaggtgcccctggttgactcaagagaaggatgccatttggctgtgccctgtctcagagtaggagctggtgtagggggaagaggctgtaaaaatcacagacatatgctgccgagtgaccagtgggctgacctttctctgcaggttacccctcgcccctgggtggctctgagcatgcctctagtccagttccagccagtggcccgtcttcggggccccagatgtcttccgggccaggaggtgccccgctggatggtgctgacccccaggccttggggcagcagaaccggggcccaaccccatttaaccagaaccagctgcaccagctcagagctcagatcatggcctacaagatgctggccagggggcagcccctccccgaccacctgcagatggcggtgcagggcaagcggccgatgcccgggatgcagcagcagatgccaacgctacctccaccctcggtgtccgcaacaggacccggccctggccctggccctggccccggcccgggtcccggcccggcacctccaaattacagcaggcctcatggtaagactggctgccctggccctcaggtgtctcagagcgaatggctggggcgtgggtggcggggtggacagaccgtgctctgttgccgactgggttccccggtttgggattgcacgggcccatactgcacttctgggtgctcgggtggtgggggcagctaaatgctgcttccccagctccccgcttcccctggggccgctggttaataggtgtatctgctgtgtcccctggagccagggctgcccacggggctgggcgcaggcataaacctgggacgcactgttttctcttttgtttctccctacatgtaggtatgggagggcccaacatgcctcccccaggaccctcgggcgtgccccccgggatgccaggccagcctcctggagggcctcccaagccctggcctgaaggtgagctccctcttctatggtggtgcacccgtgcccttactccccatctcaagcttgggtccttgagatgagctttgtcagggagaaagggccgagggtggtcaggctgaactgcagcctgtacttttcttgtggtggtccccgggtctcccctgtagccagtcagttcccaaaggctgtcgttcatccctcctctgacagcttgtggccttcacccagtccctgagccctgtatatgtaattgctcagtaagtgctgcaggctcccatctgttgggctcaaagaggcagtgggactcattacccatcctcttggagcctgaggtttagcgatgggcattgaggggcaaattgcttccactggatttagttggcactaggaggagatgacaggaaatgctgccatagagccacagacagaacaaaaaggccttgggagcctggggctggccccagtggagggtgtgaaggacgagggtgaggctgagatctggaggaggttggagcccaaggcaggtgtgaaggacacccctgggtgaaaggtgggagatgggcggggtctgcctgtccccagtgcctcaagcagctcagcagctttccatttccagcccgggatgggccccagagctcaacatgacgccctggccccttgccttctcccaggacccatggcgaatgctgctgcccccacgagcacccctcagaagctgattcccccgcagccaacgggccgcccttcccccgcgccccctgccgtcccacccgccgcctcgcccgtgatgccaccgcagacccagtcccccgggcagccggcccagcccgcgcccatggtgccactgcaccagaagcagagccgcatcacccccatccagaagccgcggggcctcgaccctgtggagatcctgcaggagcgcgagtacaggtgagggcggggcccagttgccaaggtcactgccctgtgtcccccatgtccccctggggaagccactcaactttctcccccactctagcaaacagtgccctgtgcccaccactgccacttggcctacacctccttcctcacctccctgctcccaccctggctgcggtctgtttcccacacagcagtttgagttctctctctttttttttttttgagacggagtttcactcttgttgcccacgctggagtgcaatggcacaatctcggttcactgcaacctgcatctcctggcttcaagcgattcttctgcctcagcctcctgagtagctgggattataggcatgcgccaccacacctggctaattttgtatttattttagtagaggcagggtttctccatgttggtcaggctggtctcgagctcctgacctcagatgctcccaaagtgctgggattacaggcatgagccaccgcacctggcatgaattctctttttatgattgatatcagatctactccgtggattaaaacctgcctgtagcttcaattatctgcccaataagctttgccttatgtccactcctgcccagcatccttcctcacccatcccagtctctctgttcctcttttcatttatttaacaagttagacttgttcctgccccaggacctttgcacaggctgtgcatggctccttctactcattcaggcctgattgctggggttccctcctcatggaggcccttcctgtcacttccagccactctctggaattgcagtggatattttattttttttaaatctcctttatggcctgtgttttctaatgagactgagagttccttgctttgttgttcttgtttagtgctaaggccctgcacttaaaatggtccctggcatacagttggtgctcaatgagtatgtgcagaaagactgattaagagaattagcccacataaccttcgcatgtaaccttcgtaaccttcagaccaagcctctagggtcactccgaggggttgcctcagttttgaggtgagaatgctgaggtgtgcagttgaaatagattcccaccgccctgcgcctcatccatgccagagctgcatgaaaaccttggcccgcctgacgccagaacctggctcacaccactgaaaaggcatgacctgggcgcgtctatcaggaatcttgtttgctgtcccctgaggcccggtcctgaggagtgccccgggctatctccctctctgctgtgccctgcggccagcatcctcttctgaggcatctcttgcctcatgactagtgcctgcctctctcgagggatgggtcccctgcagctccagctgtaactgggtgccctggcaaccctctcaccgcctttgctccttgtctctgctcccaggctgcaggctcgcatcgcacaccgaattcaggaacttgaaaaccttcccgggtccctggccggggatttgcgaaccaaagcgaccattgagctcaaggccctcaggctgctgaacttccagaggcaggtgggtgctggcatggccgcagctttccgaaaagggcctttgtcaccaacactgctgctaaggctccaaatacggcttgcctggctagtattacacctgcctgggctgtgaaaagcagccgtggccatccatgggcactcaatcactgcagagccttcctcttacggcctgcgcagtgctggggacgtggacctcactaccctaaagcacttgccgcctcaaagcagacttgtatgggcttctttcttcctttccctttccctttttttttttttttggaaacagtcttgctctatcacctaggctggagtgcagtggcataaactctgctcactgcaaccaacgcctcctgggatcaagcaattcttctgcttcagcctcccaagtagctgggattacaagcgtgtgccaccatgcctaatttttatatttttagtagagacagggtttcaccatattggccaggctggtctcaaactcttgacctcaaatgatcggcctgccttggcctcccaaagtgctgggattacaggcatgagccaccacgtgctgtcctgcatgggtctatttctgagggtactgtgcttagaccctggagtgcagtggagagatcacagctcactgcaaacttgacctcccaggctcatgtcctcctcccgcttcagcctcctgagtagctgggactataggcgtgcaccattacacctggctatatttttcttttttttgaaacagagtctcactctgtcacccaggctggagtgcagtggtgccatctcaccccactgtggcctctgcctctgtggttcaagtgattttcctgtctcagccactgagtagctgggattacaggtgtgcaccaccatgccgggctgatttttttgaagtgcagtggcacaatcttggctcactgcaacctctgccttccaggttcaagtgattctcccacctcagcctcctgagtagctgggattacaggcatgtgccccacgcctggctaatttttgtatttttagtagagacagtgtttcaccatgttggccaggctggtcttaaactcctgacctcaggtgatcctcctgcctcagcctcccaaagtgctgggattacaggcatgagccaccacgcaggcctggtttttgtatttttaatagacacagggtttcgccatgtcgcccaggctagtctcgaactcctgagctcaagccatccacctgtctcagcctcccaaagtgctgggattacaggcatgagccactgctcctggccgcctagttaatttttcttctagtttttgtagaagtgaggtctctccatgttgcccaggttggtctcaaactcctgggcttgagcaatcctcccaccttggcctcccaaagtgttgggattactggcgttaagccaccacacccagccaagagtgttatacttctgaatgactcctaagacgtgtgtgtggtagaggggaggcaagctggaggtccgagaggaccccctggatagatgtccagaagtgatcaccttctgtcctgtgctcgccctgcccgggggcacctgctagacgtcccctgcacacacggactgggtgtgtaaggcacttacaatgctcctttagcggtgaagcatgtgacatcaccatacgtgtttgtcattgtggatgccacagagctgtgcagtgcgcgggcttgtcctcttccctcctacagctgcgccaggaggtggtggtgtgcatgcggagggacacagcgctggagacagccctcaatgctaaggcctacaagcgcagcaagcgccagtccctgcgcgaggcccgcatcactgagaagctggagaagcagcagaagatcgagcaggagcgcaagcgccggcagaagcaccaggtacgctccggtggccccaaggccctgcagcccgcccacctggctgcctggcttgtccagcggttgccacggggctgtgtttgctttgttcctaaacatgctgcttgtctctctcttttgctcattgtaacagtattctaggtactgagagtgtattggtgtaaaaacccaatggtagggagaagatagtgatgaaatccacgcgtagcacgtctggaaggtgatagggcacaaagaaaaatcaagccaggatagagaggaaggaacgggctgttgtagaactgatgttgggggagttctttcttttggaggtgacatctgggcagacccccaaggaagggaggcacacagatctgtgggaaagagctttctgggaaaaggagaaggtgcaagggccctggggctggaatgtgcctgtgttttctctggaaagcaaggacctgcatgagccagagtagagtgagtggcggggagagctggaggaagggagcgcagggaggtgacgagcaggtgatgcagggccttgcgagctgcatggaggatttgggcttttgctctgagtaaagtgggagccatagagggttctgggcagtgcagggactgatctgactcagggtttcccaagatgaatcagtaagacggaaatcttcaaatctaaaatcaagtaaggatttggggatgattgtgctgatttggtcatttatagattttctagagattttctataattaatatcttattggtgtagtgtaaaataatctagacagtcaacacagcaatctctgttaacttttttttttttttttgagatggagtctcgctgtgtcactgaggctggagtgcagtggtgcaatctcggctcactgcaacctccatctcctgggttcaagcagttttcctgcctcagcctacctagtagctgggattacaggcacctgccaccatgcctggctaactttttttttgtatttttagtagagatggggtttcaccatgttggtcaggctggtttcaaattcctgacctcaagtgatctgtccgtcttggcctctcaaagtgctaagatggcaggcgtaatcccccgtgcctggccaacatttttttttttttttttttttgagatggagtttcactcttgtcacccggactggagtgcaatggcacgatcttggctcactgcaacctctgcctcctgggttcaagggattctcctgcctcagcctcccaagtagttgggattacagatgtgcgccgccacacctgtttgtttttttctttttttgagacagagtttcactcttgttgcccaggccggagtgcagtggtgcgatcttggttcgacacaacctctgcctcctgggttcaagcgattttcctgcctcagcctcccaagtagctgggactacaggcacctgccaccatgcctggctaattttttatatttttagtagagatgaggtttcactatgttggccaggctgctggtctcagactgttgacctcgtgatccgcctgcctcggcttcccaaagtgctgggattacagacgtgagccactgctcctgaccaccaacatttttttatatatattatttcagccttttttcttgtatattaatacaaggttaaatagccctttttaaattttttctaaaactttgctttttttttttttttttttgagtcagaatctcactctgttgcccaggctggagtgcagtggcacgatctccactcactgcagcctctgtcttctgggttcaagcgattctcctgccttagccacctgagcagctggaattacaggtgtgcaccaccacacctggctactttttgtacttttagtagagatggggattcaccctgttggccaggctggtcttgaactcctgacctcaagtgatccgcctgccttggccttccaaagtgctggaattacaggcgtgagccgctgctcctggccacatcgctttgtttttaagtatcatggaaacatgacttttgatgtctacactgtattccatttctatgtgtccaggatctaatcatttatgtcacctttttcctgtttgaggacatgcagcatgtttcagcttttgaaaattaaaaattatgctaggaccggaattcttggcttgaacattttggagctggtctctgatatttccttaaaataaatttgtagtaatggaataagttgggtgaagggttggaagcatttttgagacatttcacatccgtgccatgctgccctgccagtcgactgcactgtgtgcctacctgctgtgtttgagggcctttcccacccacagttgccggtgcttagtttgtttttttttttgagacggagtctcgctctgtcgcccacgctggagtgcagtggcgcgatctcggctcactgcaagctctgcctgctgggttcatgccattcttctgcctcggcctcctgagtagctgggactacaggtgccagccaccacgcccggctaattttttgtatttttagtagagacggggtttcaccatgttagccaggatggtatcgatctgaccttgtgatctgcccacttcggcctcccaaagtgctgggattacaggcgtgagccaccgcgccctgccgccagtgctgagttttatcatcagagagagaaacccaaccgcggcaggcaaagggtgtccctttattgttttcataatagtctcgtttttattttatgtattatatttatttttttgagatggagtctcactctgtcacccaggctggagtacagtggtgcgatctcagctcactgcaacctctgtctcctggattcaagcgattcccctgctttggcctcctgagtagctgggattacaggcatgtgccaccacacctggctaatattttttgtatttgtagtagagatggggtttcactatgttggctgggctggtctcgaactcctgacctcaggcattttgtcctcctcagcctcccaaagcgatattctaggtttttttttttttttttttttttgagacagcgtctcactctgttgcccaggctggagcacagtggcacgatctcggctcactgcaagctccgcctcccgggttcacgccattctcctgcctcagcctcccgagtagctgggactacaggcggcccctcaccacgcccggctgattttttgaattttttttgttagtagagatggggttttaccatggtctcgatctcctgacctcatgatccgcccgcctcagcctcccaaagtgctgggattacaggcatgagccactgtgcccagccctaatttttttatttttatttttagtagagacggggtttcaccgtgttagccaggatgatctcgatctcctgacctcgtgatctgccctcctctgcctcccaaagcgctgggattacaggccaatattctaggttttaaacaagccttgcggggagatgtgtccaccatgctgctgaagggtcagccttctcttttgtgctttcctgcaggaatacctcaatagcattctccagcatgccaaggatttcaaggaatatcacagatccgtcacaggcaaaatccagaagctgaccaaggcagtggccacgtaccatgccaacacggagcgggagcagaagaaagagaacgagcggatcgagaaggagcgcatgcggaggctcatggtatggtcctgccttcttgacgtgcgctcttctacatgtgtagctggtactgcgggctccaggggtcactccccagggttacgccaaggcatttcacagctcggagttagaggtgggacagagggaaaagagcaggcgcgggcttgggagtcagtcctgggctcggatatttgctgatctctctgatcatcagaatgactgtgtgacctcaggccacttagccggctcctctgccttctctggaaaatggaggtggtgcccccttccctcgttctgtgagagccaggtggtgtgatccagacccccgacccctagcataaacatctctgaccatttatttgtgactgagtcgctggttgggcagatattggcagcgtgttctgggccaggtgctgctctgtgtacggggacatggcccctgcctttgtgggggctcctggttgtgcttgaggggcagatacgcgaatgaagcaaacagagtagtggatggtgaccgctacagtgaggagggggaagtggagtggaaggggagggacagggtagtaagtaaaagccttgaaacagaggcccaaagggtggccctgatgcacaaacgcagagacccagggaaggagccccaggcagtgcggacaaaggttgaggtggcaggcagccatgtgccagggcagccggtagccctgggctcccagaacagcgttgtgtggggcaggaggtgaggtcagagcttacaggggcaggtgggaggtgggacctttcagaccattgggaggactctgggttgagttctgatcatgaaggggagcctcacccgggagggttttggctgtggggtgatgtgatctgatgtattcttagaaaggtggggggctgctgtaggaggtggtgggagggatgcaccttggacttggtggagagaaggcttcgggtttggggtgtatttcgtggacagagtgggtaggactggctcatggcctctgtaaatggctgctggcgggactgtctgcctagcgggtgcccttggaacctagcccttggtgggttttgaggaaatgattcctgaatgaggagtcgattgccgtgtgaagggctggtggcacggcacccgcgtgagctacgcgtgccctcagtgcgcttctggattgactggccatgggtgctcacagacatgcacattgtgccaccacattgcagtaacccccatgcttttgtaggctgaagatgaggaggggtaccgcaagctcatcgaccagaagaaggacaagcgcctggcctacctcttgcagcagacagacgagtacgtggctaacctcacggagctggtgcggcagcacaaggctgcccaggtcgccaaggagaaaaagaagaaaaagaaaaagaaggtgtgctgggcctggcatggtgcccgccgcgggtgggatgggagcagccgtcttcacgtgtgtggcctcagccttgtgggtcagggcctgaccgtgtctctctctatttccagaaggcagaaaatgcagaaggacagacgcctgccattgggccggatggcgaggtgaggaagcagggtttcttgtggaagtatcaagctagccctaaggcgttggtctgtttcagactttaaaacctgtgttcttttaaaattacgaacaatgatatgtgatgatggtgagaatcccagggtgtcctctgacgcccatcccacccgaccccacatcccacatgttgtgttttcttccagacctttttctatgcatgtgccacaggattcatctttcaggttttactttgttgtaacgtccgacttacaggagaggtgcaagaaccgtccagagatgtcctgtgtgttcttcacccagagtctccattttcacgttttgtgttttgttttgtttctttgagacagggtctctctgtcacccaggctggattgcagtggcggatggctcactgcagccttgacctcctgggctcaagtgatcctacccttcgagtagctgggattacggttatgccccaccacacccagctaagttgtttttttttttgagatggagttttgctcttttgcccaggctagagtaaagtggtgcaatcttggctcattgcagcctccgccccgcgagttcaatcaattgtcctgcctcagcctcctgagtagctgggattataggcatccaccaccacgcccatttaattttatttttatttatttatttatttattttagacggagtctcgttctgtcacacaggctggagtgcaatggcacaatctctgctcactgcaagctccgcctcctgggttcacgccattctcctgcctcagcctcccgagtagctgggactacaggcacctgctaccacgcccggctaattttttgtgtttttagtagagatgggatttcaccgtgttagccaggatggtttcaatctcctgacctcgtgaacatcggcctcccaaaatgctgggattacaggcttgatccaccatggccagccagtttttgtatttttagtagagacggggtttcaccatgttggccaggctggtcttgaactcctgatctcaagtgatccacccgccttggcctcccaaagtgccaggattacaggcataagccaccacgcctggcctaattttttaaaatttattttctatagagacgggggttccatatgtttttcaggctagtctccaattcctgggctcaggcatcctcctgcctcagcctcccaaagtgttaggattataggcatgagcccccgcacctggccttcacctgtgttttttcctaaactctttgagagtcaaatgcagacgtgacagcgccttacctccatgtaattcattatctacttcataaagacaaggttgtttctgcacactgtaccgaggtgacggacacaggaggtgaacattggtacagcactgttatccaatctataggccttcgtatgaggtttggccagtttttccagttatcttcacagcagcagagaatcctgggtcacatttagtggaggtccctttagtcagctttagtcttaaagagctccttgtgtgtgtgtttgtttttttgcagagatggggtctcatgttgcccaggctggtcttgaactcctgggctcaagtgatcctcccacctcggccttccaaaggctgtgattataggcgtgagccaccacgcttggcttcaggccagctatgtcatccagtggccccggactttggtttgtctgatgttccttgtggttggagttgggttatgtgtctctggcaggcagacccaacatggccctgagtccctctcagggtgtcatatcgagagtgcatggcggaggttagcaaataaggtcactggtgatgctgactttgaacccctgccaagggatctccactgtccagttactgtttttttcttttgtaatcagtaagtaccctgtagggagatacttgagactctgtaactatgttgtaactcctcagaattccagctactccttttagtatctttttttttttttttgcctgtatcagtttttgctctgatggctacaggatggtgacttttatttccatcgttctttctgcattgatttgtttgtttttctatagtaggaaaagctttctctttggtcctgttagtcctgtggccatggtctgccaacccctggtgtagacttacggattcttgtttagttgaatgaatggattccgatcctttaaaatgatttcttttggtcatttagctttagccagcaggagccccttgccattggctcctgtttgcttttggtacatgcccaccattcctggagcacttccttcctcatcagacttttcttctgctttccctgcctgagctctctggagccaactctttctccagggagtcctggttccttttttttttttttttgtctgtcaagacggggtctccctgtgtcacccaggccggagtgtgtggtggtgcaatcatggctccctgtagtctcaacctcctggactgaagcgatcctcccacctcagcctcctgagtacctggggctacaggcgcacgccaccatgcttggttaagtgttctgtatttttttgtagagacagggtttcaccatgttgcccaggctggtctcgaactcctgagctcaagcaatctacctgccttggcctcccaaagtgctaggattacagacatgagccactatgcctggctatatttcgtattattacagaagaatatttacatgccaagatctgactttgggggtgcttcctgctagtgggccatcactgcttctaggccctctgagcagccggatctgggaaatagatgtatgtacacatactcatctgcattgctgtttgtatatattaaaacttgtggctgggcatggtggctcatgcctgtattcccagtactttgggaggccaatatgggaggactacttgagcccaggagttcgagaccagtgtgggcaatatggcaaaaccttgtctttataaaaaattttaaaaattagttgggtgtagtggcatgcacctgtggtcccagctacttgagaggctgaggtgggaggatcacttgagtccaagagtttgaggctatagtgagctgtaatctcaccattgcactccagcctggtcaagacagtgagaccctatctcacacgcaaaaagaatcttgaggttatactgacacctccaattctaatccaacagcacagggttaatttttatcctttccgcctttccataattctaaaatcagcaacctgatttcccttagcaataataggcttacttacctgctccattttagaatacacagaaagtacgttccaaagtgctaatggacacctctatgcagaagtctcctagttagagttcagtatttatagagttcctctacctcaggatatgtgttccaaatactgtgtccagaagttactggggccgggtgcggtggctcatgcctgtaatcccagcactttgggaggccaaggtgggcggatcacctaaggtcaagagttcaagaccagcctgaccaacatagtgaaacctcgtctctgctaaaaatacaaaaaattagccaggtgtgggggcacacgcctgtggtcccagctacttgggaggctgaggcaggagaattggttgaacctgagaggtggaggttgcagtgagccaggttcatggccattgcactccagcctgggtgacagagtgagattctgtctcaaaaaaaaaaaaaaagaagttactttggaccaggtgtggtggctcatgcctataaccccagcagtttgggttgctaaggtgggtggatcgcttgagcccaggagttcgaaaccagcctgagcaacatggtgaaacctcatctctacaaaaaattaaccaggcttggtgcgcacgcctgtagtcccacctactcgagaggctgaggtagggggataacttagcccaggaggtccaggctgcagtgcactgtgtttgtaccactgcattccagcctggggagctttttattacttgagacagggtctctctctgtcagccagttctgtctcacagttctgaagccatctggaggactcaagaaaaaagtaatgggccaggtgcggtggctcacatctgtaatcccagcactttgggaggccgaggcaggcagatcatgaggtcaggagttcgagaccagtctggccagtatggtgaaacccagtctctactaaaaatacaaacattagccaggcgtggtggcaggcttctgtagtcccagctactgggaggctgaggcaggagaatcacttaaacccgggaggcggatcacaccactgcactccagcctgggcgacagagtgagactctgtctcaaaaaaaaaaaaaaaaagtcatgaagtgggaaagtgcatgaagtgggagcttgtgctcagtcctgctgtggctgcctgtcctgtggagtgttgagaacaggcaccggcacttgctgctgcttgtgggttttcttgttctcggacagtggtactcagcctctgttgtgtgttctagtcacctggggagctctctattattattactactattatttgagacagggtctctctgttgtccaggctggagtccagtgatgaggtcatggctcaccgcagccttgacgtcctgggctcaagtgatcctccgaggacctttttctaagtagtagctgagcatgaaggcatgtgcctgttgttgcagctgctcaggaggctgaggtgggaggattgctttagtccaggagttcaagaccaacctgggcaacatagggagactctgtctctccaaaaaataaaataattacctgggcatggtggtgtgcacttgcggtcccagctgattgggagccagaggtaggcggatcacttgagcccagggctttgaggctgtgatcacacctgtgaataaccatggtactgagcccgtctccaaaaaataaaaagtaaattaaaaatcttaaaaagcgaggatgcccaagcctcactccagaggagttcaatcagaattttgggtgtaggggaggcatgcagcaatcggcatctttgactgctcctcccagtgatcccagagaggatgtggagttgaaagtccctgactgaggcagcctgcagagcccattgttggggtaagaggttgctcttatggtggccgctctgtgggtgagcttttagcgcgtagagactgatatccctccgctgtgtggacggtattgacactgtgagcgcagcagttttgcaggtagttataaattcctggaagatgaaaaccaaaatttaaaccaataactttttctccatcctggaagttttttctaggaaatatacaagaattgatgagggagaaaatgtttatccattgaatctcaacaggaggagtttcatatttgttgctaagaggaattatttttgaaatatttcaattagctttttaacaaaaaagaatgaggacccttgatgagatctacaaatagagtataagtgggggaaaaaatcaaggtccaaagaatgtaaattatataaccgttagtgtaaaaaagagggagaaagtggaaacgtctaagtccttgtttcttatccatggaattgatctggaaggatggacaggaaactgataccagtggaaaactgtgaagagaaaaacttaggctggagcacagaagaatggggagagcccacatgatgctcttcagttttcgttaaaaaaataaaaatgggccttgggaggccgaggcgggcagatcacgaggtcaggagatcgagactgtcttggctaacacagtgaaaccccgtctccactaaaaatactaaaaattagctgggcatggtgatgggcacctgtagtcccagctactctggaggctgaggcaggagaatggcatgaacctgggaggtggagcttgcagtgagccgataccgcaccactgcactccagcctgggcaacagagtgagactccatctcaaaaaaataaataaataaaaataaaaaataaaaatgggccgagcatagtggctcacgcctggaatcccagcactttgggaggccaaggcgggtggatcacatgaggccagaagtttgagaccagcccggcctgaattttcagctatgagtgtctggactatttgaaaattacaatgtatatgccagttaccttaaagaaacaggtgttgggagactgaggcagagaattgcttgaacccaggaggcagaggttgtagtgagccgagagccgagatcacgccactgcactctagcctgggtgacagagcgagactccgtctcaaaaaaaaaaaaaaaaaaaaaagaagaaacaagtgtcagccaaggttgatgggttatatatttttactggattactgagtatacagtttacgcattttcccaccactggccatgtttgcctgccattttctgtgcaaacagttgagtgggtgcttcccaccttggcctctgtaagtgtttggtctggaggccctgcaacctcagtgtcacacgaatgactctttttcagcctctggacgagaccagccagatgagcgacctcccggtgaaggtgatccacgtggagagtgggaagatcctcacaggcacagatgcccccaaagccgggcagctggaggcctggctcgagatgaacccggggtgagttgggccttgcattccagatgcagtggggatccaagtcctcggtgggccttgttccagggaggtggcagccaggagcaattttacttctgtttgaattcccggcaggtttggtagggaaagtgaattctgctggctctgagcagatttgtatgaaagcccttacattttttctaggtatgaagtagctccgaggtctgatagtgaagaaagtggctcagaagaagaggaagaggtaagagtgcatttcctggctttcaaggctctcagtgcccactggcagtgacttccaccctgtgtgttgtgaccgtctcctgccctggctgggcatcttgtggggcagggaacagcagggcccaggcctgcccgaagtcggtgctttagagctgtcctatccaatagggcagcttctggcgacatgtgaccatttccattttaaattaaatcagtcacattacataaaatttaagactcattttctctttcacactggctgcatttcaggtgcttggcatcccttatctgggaatggtctgcctcatttgcccattttttttttttttttttgaaacggagtctcactctgtcacccaggctggagtgcactggtgcaatctcagctcattgcaacctccacctcccgggttcaagcaattctcctgcctcagcctcccaagtagctgggactacaggcgcctgccaccacgtccagctagtttttttatgtttagtagagatggagtttcatcatattggccaggctggtctcaaactcccgacctgaagtgatccacctgcctcagcctcccaaagtgctgggattacagacatgaacctccacgtccgacttatgatttttttgttgttgttttgaaatggagacttgctgtgttgcccaggctggagtgcagtggcgcgatgttggctcactgcagcctccacctcccgtgttcaagcgattctcctgcctcagcctccctagtagctgggacttcaggcacctgccaccatgcctggctaatttttgtatttttagtagagacagggttacaccatgttggccagtctggtcttgaactcttgactggtgattttttttttttttgagacagagtctcactctatagcccaggatggagtgcagtggcgcgatctcgctcactgcaacctccgcctcccgggttcaagtgattctcctgcctcagtctcctgagtagctgggattacaggcgcccgccaccatgccagctaatttttaaaatatttttagtagagatggggttccaccatgttggccaggctggtctcgaactgctgaccttaagcgatccacccacctgggcctcccaaagtattgggattacaggcacgaaccagtgcgtcaaagtctgttctgtgttagtcactctaaccctcttatgattattgttcacatggtacatctttttcccttcttttactttcaacctgaatctacaacagcatatgggttttgcattttcagctagtatgacagtgactgctttttgactgagtttttaagaccatttatatttactgtaatttctgatatgattgggcttacatttgctatttcttttctatgcctcctgtttttgttcctcctttactgccttttgtgttcaatgttttttttccctagatttttatttttatagtgccttttttttttttgagacggagtctcgctctgtcacccaggctggagtgcagtggagcaatctcggctcactgcaatctctgcctcccgggttcaagtgattctcctgcctcagcctcccgggactacaggtgcatgccaccaaacccggctaatttttttttgtatttttagtagagacagggtttcaccatgttggtcaggctggtctcgaactcctgacctcaggtgatctgcctgccttggcctcccaaagtgttgggattacaggcgtgagccaccacgcctggcctctcctatttttttgcttacctcttcatgtttagttgaagcgtactttagctaccctggagtctgacttttaaaactctgggaggttgtggtggcgtctagtctgtttagtaatttcctggggctcagtctgtgaaatctggttcctgcatagtgtgtatagcctctgctgtatttcctcaattcttttaaacattttttggttttatcttattcgtgatttttttcctggttcattaggggcaggcagtgtttctttgtcacttagtggtcatccaaagattggccacagtttgtgctcagacacgcgccttctttctcctgctgatggttcagttgtatgaggaggtgcattccacatttgggccattgtcgggttctccctggcacttatgctttgctgagtcctttggcgtctctttgcatatgcacagactcagcctcagccagtgatacgcttttccctaccgtggctgatctcacctccattagcagtgccactggctgtgggcattgcttccttctacaagtgactgagccccttccacctccctgccaagcctcatggcctgcagctctccagctgtaagaggttcatgtgtccagagctgaggcagaagaagtgaaagtggcccacagtaaaagtgctacaaactcccactcttcccacctgaagttcagttttttaaggttcaatgattctagtagacctttggtcaactcgctgagctctgaaatgctcactctgtcaatttgtccggctttatagttgcttttggggaggaaatttgcccacctcctcatttgggtttagccagaagtctcactcctattttaattccagcatgtctgtaccagctctgattttcttgcctaaaatgtcggtgttattaccacctgtttattccaagtgatctgtaaaatcattttttgtgacctaagggaaatcctactggcttttcactggaattatttaacagattaattgcagatcatatttttaaagctttgtagcagttccattatagatgagggaacaatcaactgtgttgtatttgtaggatttaaatggcaatacaagaatagtttaagataaggaaatgcattcttgtctatgttatcaatatgtgttatgcaaaatcgcagtaaaggctggaaagccattaaatgatgcaacatgaatgattaaacaagttcgtagataacttgcagtaaactgagatgcctcttgtcgccagtgttatcagacatattgtagatggttgagacttgtcagtaaagctggaagtaaattacaagcaataaatattgaaagttggttctaagatatttaaagccaggcgcggtgtctcacgcctgtaatcccagcattttgggagggcaagttgggtggatgatccaaggtcaggagttcgagaccagcctggccaacatgatgaaaccccgtctctactaaaaaatacaaaaattagccggggtgatggtgggctctaagatatttaatacctaggaaatccaagagaatcaactgataaactgctttagtaggtcagcagagaatagacgtgtaatgttcattgtataacaggggtaggagagatatggagtctacttctaattagtaatgaaagtccacaataccctgagatagccttaaaagaagcgtcggggccgggtgcagtggctcatacctgtaatcccagcactttgggaggctgaggcaggcagattcttgagctcaggagtttgagaccagcctgggcaacatagtgagtccctgtctctaccaaaaatgcaaaacaattagccaagtgtcatagtgcacgcctgtggtcccagctactcgagaggctgaggtgggaggatcgcttaagtccagtgggtggaggtagcagcgagctgagatagcaccactgccctccagccagagtgacagagcaagaccccatctcaacaataacaaaaaaaaggaagtgtcaggaatctgtggtggggaaaccaaaaacggtttactgggctgggtgcggtggctcacgcctgtaatcccagcactttgggaagccaaggcaggcggatcacgaggtcaggagttcaagaccagcctggccaacatagtgaaaccccgtctctactaaaaatacaaaaattagccaggcatggtggcgcatgcctgtaatcccagctacttgggaggttgaggcaggagaatcgcttgaacctgggagctggaggttgcactgcgccgagatcacgccactgcactccagcttgggcaacagagtgacacttcgtctcaaaaaaaaaaaaaaaaaaaaaaagatgtagccagtgtggtggcatttgcctgtagtcccagctacttgagaggctgaggcgagaggattgcttgagcccaggagtttgagaccagcccggggaatgtcacgagactacatatctacaaaaattcaaaacatttgagctgggtgtggtggtgcatagctgtagttctagctgctggggaggctgaggcaggatgattgcttgagctgaggagttcaaagccatctgggcaacatcctgagactcccatatattaaaaaaaataataataaatacataattttaaaacaaagatgtaaataataaacagcacacattccaggataggtagagggggtgagggctgtaagaagatcacttgcttctgagactgttctccccatgggagtcccgtcccccctctctgggggatgaactgaggtgacatgggcttgtctcttggtaggaggaggaggaagagcagccgcaggcagcacagcctcccaccctgcccgtggaggagaagaagaagattccagatccagacagcgatgacgtctctgaggtggacgcgcggcacatcattgagtaaggggtcccgacacaggttgttctgtgccagcttcctgtgaggtggcgctggtgggagtggctagaatcccagccatccctagctgacattcagcactgtccagccagctgctactgtggaactacagagaccaaatttatttacttcacatttcatgtattttatagggatttaatagagcaattgcattcgcatggttcaccatatgcttacgaggtacagtcaggtgtgcgggagaagccctcctcaccccgttctctgctccccggctccctccctttccactaccctccctggggaaactttccagccttgtgtgtcatcttccagagatgctgtctgcattagcaagcaaaatgtgcatatttttgtcttcatttgcatacatatctccagtgtacattggtgtgcaccttgttattttcactgaaccttccctcttggaggtcatcctgtgtccgtgcagagtgcttccagtctggtcctcagcgtgcagtgtcatactgcgtcacgttatattctcattttcgtagcctgtcctttggtgacaagcgtttaggttatatttgtcatcttttgctcctgtaacacatcacagttaacacagtaatctcttcattgcttatggtaaggaattaatagatcctgttaaaaagcaagtgagggctgggcgtggtggctcaggcctgtaatcccagcactttgggaggccaaggcaggtggatcacttgaggtcaggagttcaagaccagcctggccaacttggtgaaaccgcatctctactaaaaatacaaaaattagctgggcgtggtggcgtgcacctggagtcccagctacttgggaggctgagacaggagaatcgcttgaaatggggaggaggaggctgcagtgagctgagatagcgccactgcactctagcctgggcaacagagggagactccatctcaaaaaaaaaaaaaatgtaggtggataaaagtcacttttttttttttttttttttttttttttttttttgagatagagtcttgctcttcaccaggctggagtacagtggtgcgatcttggctcactgcaacctccacctcctgggttcgagtgattctcttgcctcggcctcctgagtagctggcacaacaggcgcgggccaccacgtccagctaatttttgtgtttttagtagagatggggtttcaccatgttggccaggatggtcttgatctcttgacctcatgatctacccactttgagctcccaaagtgctgggattacaggcgtgagccaccgcacctggccagagttactttttaaaagaaaaacattcagattagattacaaattgcctaagttttaacagctctggttttgtatgaacctgttcagtctgtgtttcttttcacctttaggctcatgaattgttcttagaaagggtgggttctatgatgatcagcatctggctaggtgcagagtgtctttctgtgctgtggcaagtgacagcattctatttgttgttttgagacagtcttgctcagtcgcccaggctggagtgcagtggctcgatctcttgactcactgcagcctctgcctccgggcttaagtgtttcttttacctcagcctcctgagtagctggggttacaggcatgcaccaccacgcccggctaactttttttttttttttttttgagacagagtcttgctctgtcgcccaggctagagtgcagtggcacgatctcggctctctgcaagctccgcctcccaggttcatgccattctcctgcctcagcctcccaagtagctgggactacaggcgcctgccaccacgcccggctaatttttgtatttttagtagagacggggtttcaccatgttggccaggctggtctagaattcctgacctcaggtgatccacatgccttggcctcccaaagtgctgggattacaggtgtaagccactgtgcccagcctaatttttgttttttgtagtagagatggggtttcaccatgttggccaggctggtcttgatctcctggcctcaagtgatccacctgcttcagcctcccaaagtgttgaaattacaggcgtgagccaccacgcccatcagagtgacagaattcttgtactgtggtggtgcaatcaggacccagagctcccaggagtccagtctggacccctcaggcttagtgcgggctgccctgcctggcctcacactgtccggctgcacctctatgtgtcttacagtgctggccacaggtcattcagcagaaagggccactccgcagagcttgtgtcaggagccagcacattgtcacagataggaatgtgtgtccttacccggcacctccatctcactcccaggaatgccaagcaagatgtcgatgatgaatatggcgtgtcccaggcccttgcacgtggcctgcagtcctactatgccgtggcccatgctgtcactgagagagtggacaagcagtcagcgcttatggtcaatggtgtcctcaaacagtaccaggtgaggtagggggtggggaggccaccgccacgtagctgcctcggtgcaggtgttcccaggtggtgcgggcttcagacctcaggcagacctgagttcaccttttgctctttgtgggcaatgcactcttcccctctgagcctcggtttccccatgtgtaaagcagagatgtggtctggtaggttagctgccaggaggacgtgcaacagcagaaagtcagtgtctactgggtgcccgatgtgccaggcagagtgggagcgatttgcactccagtggcctcacagaggagacggggccacctgaggagcagagaggtgcagcacctcctcagcatcgcaccgtgtgtaggactgaaccagggccggagctcagatctgggcatctgcatgctcaggacaggttacctgagctctgtgtggtgtgaaacggcgagcgtcaggagcttagatctaggagccggcagccctggactccgctctttcttctggggatgaggtagcaggtcctgtgtgagggtgaaaagttggtggctctgaagctcttcacctgggcctgacttgggacagtcacgaaacagagctgctcatgctcttaatgcggcctgccatccagagctcattacaaggccccacaagacaaccagtacaactccaaccaaagaacagctctctctggttttcaatttggttgtttcttttcttttcttttttttttttgaaacggagcctctctgttgcccaggctggagtgcaatggcgcgatctcagctcactgcaacctctgcctcccgggttcaagtgattctcctgcctcagactcctgagtagctgggactacaagtgcgtgccatcacgcccggctagtttttgtatttttagtagagacagagtttcaccatgtcggccaagctggtctcaaactcctgacctcaggtgatccgcccaccttggcctcccaaagtgctgggattacagatgtaagccagtgcacccagccccaactttctttaagacaactcttaaaccttttgtgctagtatcaacattcaaagctgcacatgcacctatagtcccagctacttaagaggctgagatgggaggatcgcatgagcccaggagttgaaagtgggcctgggcaacatagtgagacactgcctctacaaaaatattttaaaaattagctgggggtggtagcacacatctgtagtcccagatagttgggcggcttaggtgggaggagagcccgagcccaggacttctgagctgtagcgccctatgtcgatcaggtgtctgtactaagttcagcatgaatatgatgaccttccaggagtggggcaccaccaggtggcctaaggaggagcgaatctgcccaggtcagaaatggagcaggtcaaaactgatgtgctgatccgtagtgagatagtccctgtgaagagccactgcactccagcctgggtggcatagcgagaccccatctctataaaacaataatgaaacaaaggcaaagctcatggttagtggaattttccaagagtcccatgcaattaaaataattagaacttggctaggcgcagtggctcatggctgtgatgccagcactttgggagaccaaggcgggtggatcacctgaggtcaggagtttgagaccaggctggccaacatgatgagaccctgtctctaccgaaaatacaaaaaattagctgggcatggtggtgcatgcctgtaatcccagctacttgggaggctgaggcagaattgcttgaacctgggaggcagaggttgcagtgagccaagatcgggccactgcactccagcttgggtgagagtgagactcggtctcaaaaaaaaaaaaatgaattagaacttggccagaacttacttcctcaatccattacgaacatttccaaattttccttcataacgttatcttcagtttgcaaatagtcttctgtttaaggcctgtatttcagaaagctcccaggctttggaaatccctctcttaatcttgaaatgatgttcaggcagtgaattcctcacgaagtcgccctgaagccctcttggtttcctgagtgcaagtgtcccgtggtgtgggcaggtttttcctgtgtgctgtgtggggcatggacaggcagacaatgtaacaggtgggagtgagctgttgagatgtgtattagaaatgtcacacgtgtccatcgttcgcacagtcatcctgcagcttcacagacgttattgctaaggatgaggctaagcgataaagaatcagtttggttcagaggaaaaatccgtggtaaaggcagtagagggtgggatgtggcttaggcagaactcgtggctggcggtgtcttgactctctgaagtgggaggaccctctggtgtccgacccggccttcagtcctggcgtggccgcatctgtccttgcagatcaaaggtttggagtggctggtgtccctgtacaacaacaacctgaacggcatcctggccgacgagatgggcctggggaagaccatccagaccatcgcgctcatcacgtacctcatggagcacaaacgcatcaatgggcccttcctcatcatcgtgcctctctcgtgagtacccgctgccagcaacatcccacacgccgctcacacgctcctgtgtttgtttcctaagtttgccgcagtagaataccacaaacgaggtggcttaattacagaaatttgttttcctggaggccagaagtccagggtcaaggtgtagcaggttgcttcctcctgaggcctctcttcctgcttgcagggatacgtgcttacatgtatctcactgtgtcttcacatggtccttcctctgtgcgtgtctgtgtcctcatctcttcttcttagaaggacatgggtcaggttggatgagggtgcatcctaatggcctgctttaacttcattgcctctgtattggccctgtctccaggtacagtcgcatcctgagctgctgggggtcaggactgctccaccagcctcggggctgtgcacagctccacccgtcacagcctctgcctctgggtcccggatcaagtgggggcatgactgtgcatcccctccacccctggggaggcctggggtccctctcccgggatgtccttggtgtccttttcaagtcccacaaccagcaaagtccatgcaggggagtcgcaggagacaagaacctcccactagaaaagtagggtgaggccattgaggctccattgaacagtctctacttcctcactgtgcagtgccctgcaagggccaccagagccctcgggcacatcccagcatggcccaggtccttgggcatggtgggatccggacaccctgagaggctctcacttgccactgcctggctccaccggcctttttctccctgcaaacagagtccgcccccctgcccacctctctcgacatctctctacccagctcagcccctgcactaaagggggacctgcctagggttttcccagaaagccccagggccggctcttactggtccagttcaagtcacatgtccagcaagcagacagtcaccggcctgggggttagtctggtctgattgggcaaacttcagcatagcatttggtctggccctagagcacagcccctaactccaaccaggcactcattgggaccactacagccacgagtcagcagcggacccccaactcctggcaggctggggagcggcatgcccatgctccaaccccatgggaaaatgcccttctgcctataagacagccaggccccatgggtcacacacccatagggtaggcctgacgtcctgactgttgcagggaggactggaggaaaggtgaggaccccagaaccctcccaggtttactgtggaactgtttctttcttctatctccctgcttcctacgtggcgggtagaacagactgctctgaaggagcagggcgtccttgtgcacagcgctgcaggtagctgcacctcccctcgtggtcagacccagattgctacagcgttcctgctgcacctgcctgagctctgtcccctgtctgtgtctggaggctgttccttccggctctgcccacctcctggctcccctctgcccttcttcccctggaggctgatgggtgcagtggcagtcgccctctgcagttcccgattttccctcctttcacttacagacttctcagatcaccatctctgctggaacgccgctctccagggtgctgttgttttgcagccttggttcttagttgttaattttttgctttaaaaaatttttttaaacttttcattttgaaatgatctcatttatttttatttttttttattttttgaggagtctcgcactgttgaccagcctggagtgcagtggtgccatcttggttcactgcaacctctgcctcctgggttcaagcgattctcctgcctcagcctcccgagtagctgggattagaggcacgcgccaccatgtccggctaacttttttgcatttttagtagagacagggtttctccatgttggctaggctggtcttgaactcctgaccccatgatctgcccgccttggcctcccaaagtgctgggattacaggagtgagccactgtgcctggcgacctcattcttagaaaacattgtagagttagtgtaaagaattgctatgcacccttcacccatcttccccattctttcataaccccaagacaattatgaaaaccaggaagataacatggacgtaggactaatagcaaaccagaggccttatttaccaatcttgtcagttttctcacaagtggccttgctctggtccaggatcccacactgtcacgtctgtgtggcatgcctgtggcagttcctcatttcgtctttgtcctggtcgagcttgacgctgttgaatcctgatcggacctttggtagactctccttcaatttgggtttgtccgatgtgatcgcgtggagcaacaccacgccctgcttgatgtgccttagcggggaaggcatgagatgttgaggccttggtgtctcgggcaaggtgcctgctgggtttcccactgtaaacctaggagttacactttccgttaataactgtctcgtgggaacgtacttcgacacttgtgaatatctcatttctcttcctactttcctcaataatttcagcatctcttctactccatttcatgttgccataaaggaatacctgagactaggtgataaagaaaagaggtttagctgggcgcggtggctcactcctgtaatcccagcactttgggaggccgaggcaggcggatcacctgaggtcaggagtttgagaccagcctgaccaacatggtgaaaccctgtccctaccaaaaatacaaaaaaaaattagccaggcatggtggcgcatgcctgtaatcccagccactcaggaggctgagacaggagaatcacttgaacctgggagacgggggttgcagtgagccaatatcgtgccattgcattccagcctgggcaacaagaatgaaacgccttctcaaaaaaaaaaagaggtttatttggctcatgattctgctggctggaagactgggcacctggtgagggcttcaggcggattccactcctggtggaaggcaaaggggagccagtgtgtagagatcccatggggagggaggaggcgagggaggcgggggtgccgggctccttttaaccatagctcccacgagagttcagagagcaggaactcattcatcccccatccccagtacagtacaggccgttcacgagggttcacgaggccgttcacgagggaggcccccatgacacagatgcctcccaccaggccccacctccaacattggaaatcagacttcagcatgaggtttggaggtgccagatacccaaactatagcagcaaacgtcagataagtcttgcctgaaaaaataattacatgagagttgccaaatacatggttacctgtttctgtccgctcttctctacaaattaattggaattccaccgttaggaagagctttcccgtctcccccatgtgcttgtttgggtaattattatatcagtgtgggcgtgaacaaatattatttattttgttgcttcagtttttttcagatttggcctgggagaattctccctggaagaattgtgtcttctctatgtattcagtcatttgttaatatgagtatggacccacggatatttatttagtactccaggctacgcaccagtggctgggttttttttgttttgtggctcaaatccatccagctttggccactgggagtgctttcagttggctcttctgtcctttgacacgcccccagcatcgggtgaattttgaggactttcttgctttttggcaccaagagatgctgcaggctcatgtagtctatttcccgcccactccctcaaatcagccatttctccaaggagccctggtttcccttcttacagaatggttttgggaaccaagacctgggtcctggatgggcctgttgcttctggggtgtcattgctcctggggccctctcagtggtcagtgctaggagattcatgtgcgcgtgctgatgctttgtgcacgtatcgtctaaaaggccttctctgcctcggcatctgtttctgtgttaagctgaacgtgagttcataccactgtctgcggctctgagtgaggaccacaggttccttctcacacttccaccctgtgtgtgcgcccattctcagcttccgtggacaacagtttcagagtagtgagccggtacctccgggaagcatcttgagccactagagcgcaggccttggggccagttccttgtgtgttcagacctccagattgcagtcagattccatttccagggtgatagaggtcaccttcttcccctacttcagtgaggttgtgaggtgggtgctcctgcagtctttcccactgcgccccacctgggcaagcgtccatgctgtggaacgccagctcctgcaggccagaagagggcccgcgcgctaggaaatgtttacggcgtatgggcatccggctgtgccggccctctcactgggaattgctgcctcctgccatgagctgcttgtcctgcctccgtttggacctctgtctctgggacctgtcccctcagtcccctcctgacccttgctcctggctcttctccctcccagtgcagatgctccgcacacctccggcttctcccttggtgcgctgactgtccccatcactccagggaggtttcactgttcctgagtcagcggaagcacagggtcaggccctacgggccaggtccggtggctccaagatgccatcagggacccagcctcccccaggtttctgcccagtcattcttgggtgactccaaccctcaggctccttacctcatggttgcaggacggctgcactgcctccctcgcctcatgcaggagagtgggcaggaaagagttctaggagagtgggcagggcaaaaggcagcagaagcgcaaggctgctgagcctctgctccccacgcttcttcaggaactctccccagccttcaccacagccatgcgtccttctgtctattggctgtgccgcctggttggctgtggcttccagcggggctggagatgggttcatggtggacacagcacctccctcgtggagctgcttgggggcaaaccacgagtagtccctgggactccagcttcgagccctgtctttacggaccaccccgtctagactttctgagtggcttccctcccccactgaaaactccctgccccagagttcctcccagagcccgtcccctttgggactcagctttattaccgcctccaccctctcctcagtctctaggctgtcggtctcaggtgactcacccctccccactgcattctgcctgcccccatgtcctccctcattccagccctggtcatcccacaggggaacagccacgagttgccgctccctcccatccctgtcctcccgcctgccacctgagccaggccccgcctcgcccctcactgtcctcgttctctctcacagtcaggaaccttccgtggctggagggtggcagaaagactgtttggtgtctcctatatcctcaggtctccacagcactgttgctagcctggctctgggcgtgaagcctgtgctctgaagctgcattttcccggcagcaggtccaggcttccccagccctggcagcattgtttctgtcccccatcacatctctgtgtccctacttctcactctaaagggccttgccctcttttcccagtggcctcccttctgtcctctgaggcagagcccttcacgtcctcgccagtctctcttcctccctccctccctcagctgccctaaacacagtttctctgcccactcggagggctgtggccatgttggcctcgcccctgacagccagtggctatgggtttgcacagtgagccattgatgagagaccggcacttgactctcatttccttgttccatcagaacgctgtccaactgggcgtacgagtttgacaagtgggccccctccgtggtgaaggtgtcttacaaggtaggtcacagccactgaggtttcctctcttgctacggaggtgcaggcggtggtgggcaggacgtccacacatacctctggacagtgaacctgagaatgctgggtctccagtcgcatggagtctccaggacagcctggaactccagtcacatggatccgggagtttggactgggcagggacagggcagattagctcactggggaggagacaggagtgagcatggtggccagcactcagaggccagctcaggcgcctgagatggggacccaggaagaggggagcctgtcagccaccaggaatgtgcagatggcggtgcaggctgcgtggttccctcaggccccggccgccgctggcctgcactgcttcctcttccccctgcagcgcgtgttctgcgtggtgaggtctggggacgcgccagcggccctgccagcccctttccccactacccctgtgaggacgagccctcccgccgtgtcactgggcagttgcagggggtgcctgtgcccctcttgccacctggccacccggctccaaaagccgagctgtgcatcctgcttcccttgcagggatccccagcagcaagacgggcctttgtcccccagctccggagtgggaagttcaacgtcttgctgacgacgtacgagtacatcatcaaagacaagcacatcctcgccaaggtaacgtgtccctgtgggaaatgccaggccatgggccgagtgctcacacgtgggtcacgctgcccgtctcctccaaagcccctacaagtttcttcccggagtcccacctgcatgtgcgtgaagacagctgccctgtgtaggggaaaggcctaggtgggggcgacctcaggtttacctccctaactgtctccaggcaggccctgagtcaggcccagaagctggggccatctacacagcatgcgctctgcctcctctcgggccttctgcccagagagcctcagcaccaaggcgtctcctgacccgcctacagagtccccatggggccttggccagaccagtcttgtcctcctgtctcattgccttggccgtccctccctggggccctggcttctcaccacaggccatgggctgagattcagcatgtgggggagagctcgagggccaaataccatgactgcctgctggccttgggcagctggttcgggctgttctgtgagggtcctactgtcctggaagcctcttctgggacgaaactgtgaagggagtcccagcgtggccatgactgagaatacggcccagatagaaaacagacatagccctctgcctccaaaaactcatgttcctcatttgaggaggggtaaagatgtacctggtctcacccctaaacatccagctgagtgagtgttgaacagtagagagttttttgcgttttggtttttttttttttgagaccgagtctcgctctgttgcccatgctggagtgcagtgatgtgatcacagctcactgcaggcctgacctcctggcctcaagcgatcctcccacctcaccctcctgagtagctgggactacaggtgtgcgccaccactcccagctaacttttttaaatttattttttatggagatggggtcttgctgtactgcccaggctggtctcaaactcctggcctcaaggaatcctctcgccttggcctcacaaagcactgggcaactgtgtctggcctaacagtagagttcttgacccaggtatggggggatggaggagctgtttatgggtggctccgcctctcagtgcatggctggagtgacagtactggaatactggggctgtgaactgggtgttttcttttctttttctcttcttttttttttttattgagacagagtctcacagctgtcacccaggctggagtgcagtggagcgatctcagctcactgcaacaacctctgcctcctgggttcaagtgattctcctgcctcagccttccgaggactgggtgctttatcccggagccaacaagggaggaaactgaggcccagggagctgggtatcccacgtgcaggctcttacctcaggtccatgcttcaggtgcctcctttgtggctcacccctgctgactccttacaaagccaggccgttggcaggcacaggaaccaggctctgaaaccccgtgctcccctgccagtggctcagttgatgtaatcaccctgcagtgggagtgctctttgagtgcggccactgcgccccctcccgacccgcatggccctgtatgtagtggcgctggcccctaccccatggggcccacattctgaaccacaggctgctcattagaaatgtaccgtcaccaacccagttcccctgagaccctccacaccagcaggacaagtcccccagtcagcaagatgtgtcttctgccagaacgtgctcggcatttttctgtgctgtagattcatatgtgtgattttgcagggaagccagattgcttttttgcaatttgcattgttcacctgccaatagtcatggggtcacgggcctgtctctgcccaaggcttgcaagaggctacgttgtgtggctccaactcggtgagtcagccccggggcaggacgtcaggcctgtgctctccacccagctgcgctcttccacctggagccttcctggctgctgggcgcagagtgggagattctccccatgtgccgggccacctgctgccccctgccctgattgcccactctggggcccgcagatccgttggaagtacatgattgtggacgaaggtcaccgcatgaagaaccaccactgcaagctgacgcaggtgctcaacacgcactatgtggcaccccgccgcctgctgctgacgggcacaccgctgcagaacaagcttcccgagctctgggcgctgctcaacttcctgctgcccaccatcttcaagagctgcagcaccttcgagcagtggtttaacgcaccctttgccatgaccggggaaaaggtgggtttgcccagctgtgcccatgctgacggttccaggtgcggctggctttgctggttggaacgtgttgagcaccagctacagctggctgggcctgtgctgggtgcctggtgagagtctgcatctgcatggagcaggggagccctggaacccaaggctggggcagccacaagggccccaggggagcagggcagaggtcatggtggtgaatctcggaatgctcggggcgtctctgaccctatgctccaggtgcagagtggatggtgaggaagatggccctgaggcagctgtgggaccgcaagcgtgtggagagcacagctagaggctgtagcgtgctgtaggcccctttaggtgccctcagaactcaccctcagggcagtgggaaggaaacttggaagattccagttagcggggccacatggtcaggttctgtcttacgttgttttcaaaaagctcagtggccagtgtgtctcaatgtctgggtggcaccatcagccagactgtggcatggcagcatcatcattgatgagtggtcccacaccagcactgatccctgagcctagagctccttgctgttggaggttgaaactgtgggacagactgtgtttcctgctgaggggtttaagtaaccagatgctgaagtgtgggcagaactacagaggttacctcgaagtgccctgcccagcacggctgggcccacccccttcttcccaccttagacaggtccagggcagctggggccttcctggcctcatgcgtgagttccctgccctctcggctgctggtcaaggcagagactcttctgatggcgaaaccgaggcattccccaaagcctcgtgataaaggagtccccaatttttagactcccgggacccccacactaagggccaggatctgatgctatagttttgtcactttctgagccgagcaaaagctctgccaaaggattgccagggaagcaatagaagaaaagttttggcgtcgtctcattttcctttaacttttttaattaaaacattttaaaagttaattattagtagaggagtaggcgccgtgggaggtcagggtttctttcacctggttccacccaggctgaatgagagtcccttggggctcccggtggcagagccctccctgagaatcacccgctataagccccatgtggtcagcctggcccctgcagcgctcctggcatgagcttggcgtggggtgggtctgtggacactccagtttgtgttactcgtggagaagcagcatgcccgctgccgggggtctttctggtgaggcacagggagcagagtgctctgggtactgcggttccatgtcccaggaattacatggagggaaccagatcctcacagtttcctaaggaagagggtgccctgcctggctcccagaaagcataaagcaggctgaaaagccacgtgccaagggcaagatcaccccaggggaccccgtccaccctgtccccacatccgcaccttctagtgagacctctgtcgccctcctttggaggtaacgcttgcttctcctgtcttgggggcttccaggtggacctgaatgaggaggaaaccattctcatcatccggcgtctccacaaagtgctgcggcccttcttgctccgacgactcaagaaggaagtcgaggcccagttgcccgaaaaggtgatggagttttgaggggagccaccagtgaagcagcctcacgtgggggctttctccagggctgggcgtgctcagggcctctccccacagtcccaggcctgccctggtcaatccagcttgggggtggcgatgacgccactgggtctgtaaagccctgtgctgctgttgtagggattgaaaagcactcataggctcacatagctcacaataggttagagcacaaaatcccacttcctgtcagggggccaggtgcctgtgcgggctctcctggccacatcaggaggggccgtgggcttggggttgccccccggccccccatcatggctctgggttttcaaggcctgctgcagccacacccctgggcccagttcccacagcaagacccatggactcggggtccccggctgcagttgtccctcttggctctttgtttcctggctggctgtagagaggcccccagaagatggctggggggccctttctggcccagtaaccctctggtatctctgcctggtgcttcctctcattgcccaggtctcccctcttctccccagctgtgagggtctcctcacccacaccccagtgtgctctggtcagagctcatatgacagggccgagggggtcagagctgggttcggatggggggagtcaggcctcaagccaccttgggccctcgtgagcattatgtgtcccctgcaggtggagtacgtcatcaagtgcgacatgtctgcgctgcagcgagtgctctaccgccacatgcaggccaagggcgtgctgctgactgatggctccgagaaggacaagaaggtgggccccagagtcccccaactgcattccccactgggtgtccaaggccggcagcgtggcaggcagagcagagcgtgctctgaccatcgggtcatgatctggtcatgatccccagggcatctggccagccctggttatgatggctggtggcttgtgtcaggacacactgactcagctgccagtggcttctcctttgcctatgaaacactggctccttctgcaattggcagcctgggcccagcactaaccccagcagggttagagtgttctagaatgccccccttctctgttattaagtgaaaggaagggagcgggctgtctcctgcaggggctgctctgagaatcccaggccccaggccccacctgcctggctctcctcaccagcagtgaaattatcctcccaggaaatgcaccagaccccttgattctgcccccaaggccttgacctcggcctggcttccccgagacgttgtgtctgtgccccttctcccctgagctgagcagcagtgtgttccctagtccattcccagcccagagcatgcaccccccgccccgcccccacctccttcctcatcctggagcccagggagccctgagtcatggctcacccggctgaggccctcttgcccagctgagaccctctagggacccccacagtaacagtgcccagaacaaagctggcatcacaaagcatcggggactctgcctcagccctttgccagtcttgtttccgtcccgtcctgctggccctgtccctgccatctgccctctgctgtgccaggcagtcatttgtttcccagggcttgttgggggcctccgggcctccagcctgccatctcctcactcccaattgctgtgccaaaagccactcttccccactagagcgtccccatggcccttctcccaacacccacccatccaccaagcccaccccaccccaggagggcaagaccccatttgggtccctctcatctgccttccagggcaaaggcggcaccaagaccctgatgaacaccatcatgcagctgcggaagatctgcaaccacccctacatgttccagcacatcgaggtgagcccgccgcggctgggacggctcaggccctgctgtctgctgagctcctaggcagagctggcttctcctcgacagctctttaaaaacagactcgaatattttcattaggtaatgcctgtacatctgtctctcatttggtcttcgcttcaccagtgcttacgggaagaatcccagcagttagggcgcaacgtgcgataggaatatagggccctgaaagcttgccctcagagagcaggagcgtttggagacttctctggggatgtgtccccccacagtggggtcctgctgcgtctctttggctcactggcttttctcacgttgcggggcgtcaagagtcaccaccgtcttcagtgaagtgtgggggagtcagaaccctttttggtcatggtggctttgagaatctgggttcttagaagcatgcatatgttcgtgtttcttggtgtaaagtgtcagggtcgttggagaccgcctgctgccccgagagcccctggggctgtctcagcaccctgagcgtggctgtggccccatgacgtcctcgtgcattcagggtgtgaagagtgctgtatgggatgtcctttccttcgttggaggagtgtgagggaaaggatgtcagtggactaagaaagatggttttggcatctgtgtctggtctcagagccgccgtgggcccgtgccgagcacacagtgtgggggctttgtcctctgagcacgagcggtgtgtgcggaccgcagcggggcccggtggcctgctcctgcctgtcactgacccctctctccttgccttgcaggagtccttttccgagcacttggggttcactggcggcattgtccaagggtgagaagcttcccaactggatggggtgggcaggtggtccacccagaggttttctgtcgttttgttggctttattgctgctgttatgttgtccaatttcaaaggcagaaaattagaaaatacagaagaatccaaagcaaataatacaaatctttttttttttttttttttgaggtggagttttgctcttgttgcccaggctggagtgcagtgacacaatctcggctcactgcaacctctgcctcctgggttcaaatgattctcctgcctcagcctcccgagtagctgggattaccggcacctgccaccacccagctaattttttgtatttttagtagagatggggtttcaccatgttgaccaggctgatcttgaactcctgacctcaagtgatccacccgccttggcctcccaaagtgctggaattacaggtgtgagccaccgcgcccggccccattatacaaatctttagtgcttggagagctgaccactattaaccccaagagacaggattcctgaggcagacctggcttacagatcccactctgccgcctccaagctctgtgactctagacagctttcttaacctctctgagcctaaactctgctcactagtacagaggcactctttacatcatgtgggtgttttctatagcaccctttgtaaggggcagcccagactcctttaagcccctaatggatgtggatgctgtgtctagattttcaccattgcaaagaaccttgctaaaagcattcttccagctaaagcctccattcaattcccctggggtagtaagccatttgcaagaagagaggcgcctaatgaaaacatcacaaattctttttgatgtgtttttttatactgagttgtggaacagggtcctgtacacctggcttcaaggctgggaggcctggcttggacatgtggtcagccatatcacgtcgtccccctgccagcctcagtgtccacatctacaacacttggggtttggctggagagaacatgagaagccgaggtggcccttccttctgggtctagcagagcatgggtgtctccagtgtggcatttgctcctggggcttctttatcgggcaaggggacaaggtctggcttcccggagcatccctgttccagccccgtgttgtgccggccatgtgactcacagctcctctcattttcatgagtgtctgggtttgacgagaaatacatgtgccaccctggtgatacgcctccccagcgagggtggccgggcttatttcagttgggggaaatggctttgctgaagctttgggtgggtgacgtctgcttaggatgcatgtctgtgcccttgaacccggcgcctggcctggaggcgggcgatgcacctcctgccttacctgcctgcagggttccaggtttaacatcctgcgccttctctcctgcctcctccacactccaggctggacctgtaccgagcctcgggtaaatttgagcttcttgatagaattcttcccaaactccgagcaaccaaccacaaagtgctgctgttctgccaaatgacctccctcatgaccatcatggaagattactttgcgtatcgcggctttaaatacctcaggcttgatggtgagtatgagccagtgaggcgtttcttacagggttttgttgttgtggctgccacagaagctcctcactggcattccctcctgtgaggcagggtgaggcccaggcgctctgggtccagtggccagagtgggcctagccacaggctgagcatcttgggcactcggcactgggacaggccgtggattggacgccgggtgtcctgactcctaggctgacagtctttccacgacaatgctgggcgcactggggaaggggtgccctgtgcacttttagctggaagtgacagaattccataccatgtggacacaggaaagaaagcaccaataggcttacatagctctaaccccaggaggttaaacatccttcaggcacagctggatccaggcatgcaggtgatattggagagacttttctccagctctttgctctgccttcttccatcttggcttcctttccacctgctcagtgtccccaacaaaggcaggtcccaggctggctctcatttagctgctgtgagccgcatgcccatccctgggccattcgtagcagcccagtgactgccaccttgccacaggtcaggcctggacctggaatcagactctgtggtgagcacggagggagggaagcaagcactgccaggcaggagcagcagctgccgtagagaggctctcagcccaaccccctgccctgcggtccctgatgggaaaggtcaccgcctgtgtttctgcgcctgcctgccccagcacacgggagctcagggaggagaggctgtgagatgccgacagggcacgtgagacatgtctgtcagtcccagtgggtcagggagccctggagtgagttcttcgtgggagttactagaactgggcttacgagaaacacgagcatgagctgctgagacagacacggctcagccagtttgttgttccctacacgacctcccagagcctttgttgaagctcctgtgcaaggtctgtctcacagcaggacaccccagacctccataccccttgtcccgttgatcacttggacctgtgtttgctgggccaacctgcccaggtgccacccggagtgtgccctgtgtgtccctccaaactgcaggtcctccccggggttctgtccaggaccactctacagacacgagtctgttgcaggggtctccccggcttgccttcttccttgggggcttcccactttcagctttgaggctgaaaaccaaaatccttcagggtcctcatggccgggccaccccccaccctttcctctcctacggtctctccagcggcttctcccgtcctcgagagggccaaggcttcctgagggccatcccgtctgtgtcgtgtccctgactcccccaggagagagcctggttcccacccatcccagtgcccttctgcctactccataaggacaaggactttggtcagttgaactacagatgtgtcctctgcatgtgatgtggtcatggccacagggccagagaatccattgcgagtagaggaagggtaggagctcagtgaagtctcctgagactgcatctcccatgggtgggctggcatctgggagccgggtggcccctcacctcagcccctcctccgagctggagtagcaggggcacatctggtgcctgagagagggtgggacggcaggtggatggccaggctactgtgggcttctgcaccgtgcctgggcatgtgtaggctggtggcaggaaatggccagtttttatttcttcttttttttgagacggagtttcactcttgttgcccaggctggagtgcagtggcatgatctcagctcactgcaacctccgccgcctggattcaagcgattctcctgcctcatcctccctggtatctgggattacaggcgcccgccactacgcccagctaattttcttgtatttttagtagagacggggtttcaccatgttggccaggctggtctcgaactcctgtcctcaggcgatccacccacctcagcctcccaaagtgttgggattacaggcatgagtcaccgcgcccggcctgccagtttttatttcatcaccaaaatgacttcagtgttcaggggcacctctgtccgaactcccagcagcgcagggagtgttgacattgccttaatgcccacaacgctgagggcatcgtgggttgtcacccaggagacctgctctggctccttgacttgggttttctggggcatggggacactgatcctgccagaaaggacacgagccccctttataaggtctccatgcttttaccgtagaagattctctttgtgaaccacaaaactttttgagacagggctgaaggcaggtgcacccacagtcactgtccacccacccccaggtcccttgtgttgcgagcggcggtgttgccggcattggccgctgtgtcttccgctccccatggaatggcacagggtagagtagaggagagaatccagggctgtggtggtggtggctgtgctgacgctggacgctgtggcctagctgtgggctgggtgctggactctgtgctccaggcccacctcctctagttctcccagcggggcctgttttcatttctgggatgtgtggagagacgttttgtggtgaaacactggaaatccagttattcgccagtggcccacaggcccgtgtggagagtgcggagccagggatctggggatgctggcaggtgctgatcctgctcctgctctcagaagcaggtgttccttggtgtccccactctacccctgaggtcaccccgctgaccctgttctcctctgtgcccgtcaggaaccacgaaggcggaggaccggggcatgctgctgaaaaccttcaacgagcccggctctgagtacttcatcttcctgctcagcacccgggctggggggctcggcctgaacctccagtcggcagacactgtgatcatttttgacagcgactggaatcctcaccaggtaaaagcgggccgggccccaggtcgaggagaaggaagggggtgcctgcaaaacctcgaggagacggccctggcttgagggtcctccagcctcctccacattgtcttggaccccaggagccgggaggagctgcacccatatctccataggtcatcagggagaaaagaggcggggtcctcctgtttcccaaaatacaaacagcctttccctctgattgggaaagcagtgtataagccatccgtcggtttggtttttcttaaatcttggaatggcacccatgaggaggtggaaagtatcctgatcaatctgcgccgtcactgtggggcggcccctgcagtgtgccctgtgagcacacacactggcgcttgttcagacacaattgggggtaaactccatgccacttcgtttacttcctcctcttgttccataaccatgtacccctcatgggcctcggcatcggtggataccaggtcatgctgttacatagctacaagaatttgaaaatgagttaaacttttctctgtgtttcattataagactgataagttcttattgtttttaacatgtaaacaccagtgacagtcaggagtcccttttcccttcctctccaaccgtgctctcttctgagcctctgccagcccatctgccttcgcacatgtatgtactgagattaacacagatgcggcgtggcctagcatgtgcctcttccaccaagcagtgggtgtcaaccgccgagtgcacatcggaagctacccagccatctaatcggccaccaggcgtcccggcagatggccacccctggacgtctgctctcaaactctggttggcaggcatccgtcttttctgttgatcagcctggtcaccaacccagcagggtccctctttctctcagagtgcttgtgcaaacaccctaggtctgcgcagccctcagacatggggtcgctccaccccagacattgtcctcttcgtgttctggttgctactgccaaagtggtttcactcctacgctggggtgtgaatgtaccctgcccttccctgcagcgtgagggcagcagcgttctcagtgtgtaaattgtcgcttgtctgatgggtgaatgccgtggtggtcactggtggccccttttacgatcaggctggggtgtagcttctgcccagaccctggtgaccagccagtttcttaggaggtggttgagttgtgtgtccccgttggcaggccggcagcaggcggaagctgcacctcagggctgggggcgcgttggggagggctggccctgccaggaagtgtgctgacagggcaggagggctgagcggcagacacaaggcactcctggtccccaccagctgtggcctctgccaccccatgggtgccagtcttaagtttcagagcatcactggtactcaccctggtcctgcagctcctgggcccagagacaggatttcgtgttagcctcctcgtactgtgctggggtgatgataaaactaacaacccaggctggacgcagtggctcacacccgaaatcccaacattttgggaggccgaggtgggtggatcaactgaggtcaggagttcgagaccagcctggccaacatggcgaaaccctgtctctactaaaaatacaaaaattagccaggcatggtggtgcatgcctgtagccccagctactcaggaagctgaggcagaaaaatcgcttgaacttcgggaggcagaggttgcagtgagctgagatcgcaccactgcactccagcctgggcgacagagcgagactttgtctcaaaaaaaaaaaaaaagaaaaaaagcccatccacggcacctgcattgttgggagctaactgcaccagtcactgggccacactcctggtgcttattcactcattcgaggtatgcagtagccacgggttgggccccatgtaggctgagggagttttgaggctcacagaggtgagacctggttccggttctgtgtgcactgtgagagtggcagggcccacagccaaaccaagcactgccacaacacggccgagcttcggccccctgttgtaaatggtgctcgactgtgtaggtccacgctgtggggagctgtgccgctgccacgggagctgcttgagaatataatcccctggggggttggtgctttcttcccgaatatctgtggggtcccaataaggtagaaggtggcacttctggaggaacgtgatgagagtccccttcccccgagggacacatggcggcccaggctccaccagctctgttttcatgcggcggcaggtcaggctgggcagaattgtcaggccgagggtggcacgcacagcacacctctccagctagtgtcagaggccaccttcccttttatgacctcctgggctcctttgggactgactggcacctcttcccccaggacctgcaagcgcaggaccgagcccaccgcatcgggcagcagaacgaggtgcgtgtgctccgcctctgcaccgtcaacagcgtggaggagaagatcctagctgcagccaagtacaagctcaacgtggaccagaaggtgatccaggccggcatgttcgaccagaagtcctccagccatgagcggcgcgccttcctgcaggccatcctggagcacgaggagcaggatgaggtgagcccagcaccggccccgacccctccccagcgtgaatggtggacgcgtgagcggctttcatttttgtttttttaccttttttgcactcttattttttttgcatccctttggagtaaagggagtgtgggctgaacggaaagaggatgagtacttgctttttctttgaagtggtttttttttctaaactgctggtgaaagacgccggattgacagccctggagactgaagtcctctatttatccacagagcagacactgcagcacgggcagcggcagtgccagcttcgcccacactgcccctccgccagcgggcgtcaaccccgacttggaggagccacctctaaaggtgagaggggtagttcagtctccatgcccattcaatcctcggcttctcggctgagacggccagcaagggccctggtcccacggagcgtgcgtgtgcgtgtgcgtgtgtgtgcctttcgctgccgtgtgggtccccatccaccgcagccgtgccgggaccaccagctcattcccacggacgccgccgctcgcctctgagctcggccgccgcccaccccggcccctcctcagcggcactgacagtttgcaatcttataggaggaagacgaggtgcccgacgacgagaccgtcaaccagatgatcgcccggcacgaggaggagtttgatctgttcatggtaagcgctgcaggctggatggggcagttcaggcatcccactctgctgccaccaggagcaaagcagacgtcctagtgcccatggtggtatccctagcaggtcagggagccagggacagctcacagtgcagcccactcccacctccagactgacccgtcttccacccccagtctcctgaggatggcatcggagggcgagatgcacacccagccttctgcatgtgacccgagacctgccccaccagctctgttttctaacgggctctccagggcttcatgcactccctttcagagggagttcgccctatccaaggccaagggactgaccaggccttcagtcgcagagcccccttgcccctgggtgggaaacaggaaataagccacccaagcaggggccccttggcccgcaggcctcatgcctccaccaacgctgggccacgcagctgctgcccccctgctggggtctgcagccctcttgtgcaaccttccatcttttcgagtttcctctgcctcctgaggcagagcctctagtcagggtctgacggagccaggccaggtcagccactgaaaaatcgagagctactgtttaactctcgcagcagcgtggagccccacgggcagagaaaggcccttctgaactctcggtgttctggctctagcgtgcccctggtgcctgcatgctgatgcctctcccgttgcctccctgcccaccagcgcatggacctggaccgcaggcgcgaggaggcccgcaaccccaagcggaagccgcgcctcatggaggaggacgagctcccctcgtggatcatcaaggacgacgcggaggtggagcggctgacctgtgaggaggaggaggagaagatgttcggccgtggctcccgccaccgcaaggaggtggactacagcgactcactgacggagaagcagtggctcaaggtacatgctggagaggcccagcagctgccgcaggccagcgccaggcagggctggggagacaaagggcccaccgccaggactcaggcctgggtccaaaatgctttccttgggccactcctggccaggctccgcaggcagccgagagccttccgatgtgggccagggatggtcaggtccttttggctctgccttggaatgcaagaaggacccacggttcctgagcagctcaaaacctgctgctggttatggttggtctttcaagtaaaagggtttacctcttcccgaggttaaaaatcatgttgctgatctcagtggactgctggctttcccagtacctgccaggagggaggcacaagggtgaatcatggactattgaggcgccctgcaaagcgttgcactgctggctgcaggcagcctcactttgggcaagtccccccccatgagctggggagactcagtcatggggagggaggagagggcaagcccccaagggcctctgaacctggcaggtgctgcacggggctggcagttgcttgtggagctgacgtgagggcccgttctcagcagatggcagctggccctgcaacagcagctgcagatgtctttgagtcagtcgtgcggtgctcctggggcttcacccgacccaactttcccagcccaaggcacactgtgacagatgcctggcactgatgtcctcactggggttacggtgacagatcagaccccttcccagctcaggggctctgagttatagagacgatgattcagaatccatccctgaagttgtgtcataaaaatgtcctgaagcaataattccgagaaggcaggtggcagcttttggctatgccatgcaaagtgccacacccaggaaagagccatgtggcctagcccatgtggccaaacagccccggttccctcctgggacctcagcagcccagactcatgagcttgcctgccaagctgtgcaccagagggcgctgttgaaacacaccaggagcccaggtgacagacaggccatcctgttccccagccagcctcccaagcacagcgctccaggacccagaagagaaaccctgaaaagacagtgtgagccctgccacagacctgtgtgacagcagagctgtttggctgctgtatgagtgtcaccggccctgcatttttttcttttttaataaagacaaagtcttgctgtgttacccaggctggcctccagttcctgggggctcaagtgatcctcacacctcagcctcctgagtagttcagactacaggtacacaccaacacgcctggctaattttaaattttttgtaaagtgggggtctcactgtgtcactcaggctggtctcaaactcctgggctcaaacaatccacccgcctcggcctgcagagtagctgggattacgagcatgagccacggtgcccagctcagccctgcatatttgaggcagtgagtaccttttaaatttaagatcagttcatacgtggctgctctatgtacatttttttctaggtgtaatttacataccatacagttcacccttttggggtatatgatacaatcatcttcagtgtatccaagagttgtgcatctctcaccacagtccattttagaacattctcatcgcccccaaaagaagccctgccccgatttgccattcctggtaattcatggattctccccagccccaggcaaccactgatgtactttctgtccatatagttttacctgttctgggcgtttcctgtcagtggagtcctacagcgtgggatgctttggtgtcaggcttttttcacgcaatgtaacatgctgacccatgatgcagcaggtgtgttgcattctttgatggtgaaataatcctgcctcgtacagatttgtcacattcggtttttctgtccattcttgatggacacttgggttgtatccactttcgggctattacaaacaatactaccgtgaacattcacgtacacgtttttgcgtgcacgcgtttctctttaatatgtgatttctctttaatatctgatttctctttaatatgtgcctaggcgtagagttgccggaacaatgttagttctctatttaaccttttgagggaccccagcctggtttccttggtggctacgccagttcacagttccaccagctgtgtatgagaattcctctttctctacatcctcagcaacccttgctgttccctcgcccgctgattctagccatcccagcacgtatgaagtgccatctgagtgtggttggatttgcatttccctgatggctaatggtgtggagtatctgttcatatgcttcttggccctttgtgtatcctctagaaagagatgtctagtcacatcatcctttacccaaatttaaaatatatttatcttaatattgaattgtaagttatttacaagtgccttatcagatatcatttgtaaatattttgttccattctgcacattctcttttcgcttccgtgatatccgttgaagcacagaagtgtttcattgtacttacagtcgatttttctttttcacctgtgccttggtgttgtatctgagaaaccatcgcctatccaaggtcacgaagacttgcccctgtcttttctcctaggagggttataatttgatctcttccatgtagatccatgtaagatccattttgagttaaattttatacatgatgtgaggtaggggtccatcttcatccatccaactggaaatccagttgtcccagcagcatttgttgaagagactattttttcccattgagcccatcttattacacagtatattcaaattcacagttgtgaaaaatattatacaaaacactgtctccccactactgttggctgtggaattggcaccacttttctggcagccatctgttgccaagtgaactcaaagccttcaaaatgctcctatggccgccatcggacatggccatgactgtggcagcctaaagcaacagaactattttctctgcattctgggccagaagtctgaacccacggtgtgggcagggctgtgttcctttcgaggccctaggagaggacccttccttggcttttccagcttctgatggttccagaagcctcctggcttggggcagcgtcaccccatctctgcctctgtcttcatggggacttctcctctgtgtccccttctgtgtcttttaagaacaatttttaaaacttaatcccaaaagtaaagacctcatttgcaaagaaggtcccattccgaggttccaggtagacatgagtctggggggcacccgccgctccgccctgggtctgcagggggccttctcctggtgcctcctgcctgctgtgccctccatgctgcttctttgacccggttgccttccatcctcctgggcccctcaggctctcagcttcccatcttctctaagacatgtctgctccatcattctggtgtctctctcttccctccttcctggcacctgacacgtttgttaccccacttgtggggtgttgctgtctgatcaccatcttccttccaagggtaggggaaagggccctggctggttcaagtcacagctctgtcctcagcgccaggcacagtgcccagctcactggcacagcctcagattccctggacacctggctccccggctgcattttttaccattgggataagttattagtaccattgaaaattaatacctggggattctcttaatattgttcatattcatgttcttctcagcagttttaccatgaggaatctgtcttaaacaatgtcagttgtcaatagcgttatttaaaatagcaacaacaataaaaaaaggtggtcagacctggcagcttgtgcctgtaatcccagcacttggagaagccaaagcggggggatcatttcagctcaggagtttgagaccagtctggccaaaatagcaagacctttgtctctattaaaaaaaaaaatgccaggcacagtgacacatgcctgtaatcccaagcactttgggaggccgaggtgggcagatcacctgaggtcaggagctcaagaccagcctggccaacatggcaaaaacccgtttctactaaaaatacaaaaattagccaggcatggtggtgggcacctgtcatcccagctacttgggaggctgagtcaggagaatcactggaacctaggagttggagtttgtagtgagccaagatcgcaccactgcactccagcctgggcgacagaatgagaccctgtctctgaaaaaaagggaaatgacctaaatgcccaagaacaaggggaggctaaattagggcacgttgtgcactgaaacactaaacagacattaaaaaattttgttgtagaaaattacaggaaaagatatccatgacacagccagcagtgtggcacgtgggctacaattccagcgtggccttcagttctgcacacgtgcgtcaaaggtggggagagttctggtggtgggtggcgctgagggctgcacaacactggggacgtgcctaatgcccctgaactgtgtactaaaacatggctgctttggtaaattttatgttatatatgatttataatatatttttttaaatgcccagctactcaggaggctaagatgggaagatcacttgagcccaggagttaaagtccaaccagggcaatgtagcaagaccacatgtctaagaaaatttaaaaatcggctgggcgcggtggctcacgcctgtaatcccagcactttgagaggccgacatgggtggatcacgaggttaagagattaagaccatcctggccaacatggtaaaaccctgtctctactaaaaataccaaaattagctggacgtggtggtgggcgcctgtagtcccagctactcaggagggtgagggaggagaatcgcttgaaccaggaaggtggaggttgcagtgagctgagattgcaccactgcactccagcctggtgacagagcgagactgcgtctcaacaacaacaaaaaagaaaatttaaaaataatttttcatacaaaaattagccaggtgtggtggcacgtacctgtaatcccaggtacttgggaggctgaagcaggagaattgcttgaacccaggaggcggaggttgcagtgagccgagattgcaccactgcactccaacctcggtgacaagagcgaaactccgtctcaaaaatataaaaataatttttaaaatgtcttaaaaaggccgggtgtggtggctcacacctgtaatcccagcactttgggaggccgaggcgggcagatcacaaggtcaagagtttgagaccatcctgaccaacatggtgaaaccctgtctctactaaaaatacaaaaattagctaggcgtggtggtttgcgcctgtaatcccagctactcaggaggctgaggcaggagagttgcttgaacccaggaggcggaggttgcagtgagccaagatcatgccactgcactccagcctggtgacagagtgagactccgtctccaaaaaaaaaaaaaaaaaaatcttaaaaagaagaaatagatggaggccaggcccagtggcttatatctgtaatcctagcactttgggaggctaagatgggagcactgcttgagaccaggagttcaagaccagcctgggcaatattatgagaccccgtatctacaaaaaatttttttaattagctgagtgtggtgacacgtgcctgtagtcccagctacttaggaggctgaggtgggaggatctcttgagccctgggagttcaagactgcagtgagctatgatggtgccactgcactccagcctgggcaacaggtcgagaccctgtctctaaaaataaataagtaaataaaagaaatagatggggagagtgtggaacagaggtgtcaacatcacctccgggtgaagggatttcaggagcacgttcttttctgtacagagaagatagttctttttttttggtcaagaaattcaaccattagttttttaaagacaagcttgggtggggtgcctgctgggggcagtgctggtctttcactgcagcccaggcaccccttgagagtcccagtgtgtgttatgccccgagccagtcaagctgaagggagagcgggtgcgggggccctcctccgtgtcccagcccggcccctgggattgcgtcgcggcctctgcttgtcgacctgggtgctggctgtcctattttactactattgaccctgaaggccatcgaggagggcacgctggaggagatcgaagaggaggtccggcagaagaaatcatcacggaagcgcaagcgagacagcgacgccggctcctccaccccgaccaccagcacccgcagccgcgacaaggacgacgagagcaagaagcagaagaagcgcgggcggccgcctgccgagaaactctcccctaacccacccaacctcaccaagaagatgaagaagattgtggatgccgtgatcaagtacaaggacaggtaagcgaggaggcggggagggcgggggctgtaggggtccccgtgggagcaggcctggcatctgcactctgactctgcacactcaggcttgggccgctcactctttcactcatccacaaacactgactgaatctctgtgtctttgagcctggccctgaggaacatgctttctggaacagggaagcacacatgtatctgcggtgatgagagggaatgtcacatgtggtcgagaggagaggcaggggtgcgggtctcggagaaggggacattgcagcagagccttgagagaggggaggttggggagagtgcaccagcagaggccacagcaggcggagaggctctgccaaagttgtggcctggtggcctcaagggatgaggtgggatgaggggttatatggcagtaatgggtgctgcccgtgtggccaggaggttggggacaagaggctggcatgtctggagcagagaaagtggcagccctctcctgtccttgcaccctcccaggctacctgtgccatctctgtgttggtgagatggtggccacactcctgctctctgccaggccctgctccaagcctggagatcgctgtcctcacagacatgtcctatatacgaggcagcatgcggttccagctgtggccacggcccagcggcggatcataacgtgttggtggatcatgagtgccatttatatgtttttcatttactaatatccttttccgtgagcgactctatatgggtaccatttaaataagaagaaaggaatgttctcagcaactccccagggaggcatgtgcaccttctgccagcccagggcaggtcacagagctgggcaggagccagcaaaggtgtaaggcccatgcctggcccaggactcacccagtcttccactctccaaggtcttatttcacttcctggtacacactggccagtacggctgtccccgtaatgggagggttgtactgtttgattttaaataacagtttgctgttagtcatgaagcagagcgtgggggaattgtatctgttggaggggaaagtgaagggagcccacatgcatggtttggagagaatcttaccaagtgtgaagttttagaggatggtaacaattggagtgcctaaattaatgagtcaaaattaccgcgcaaggccagctgtggtggtccacacctgtcagcccagcactttgagaggctgaggtgggaggatcacttgaggtcaggagtttgagaccagcatggacaacatggtgaaaacccatctttactgaaaataggaaaacaattacctgggcgtggtggcacgctttttgggaggctgagacaggagaatcacttgaacccaggaagtggaggttgctgtggaccaagattgcaccactgcactccagccttgggtgacagagcaagacgcccactccaaaaacaaaatactgcttaaaaaggttcttttagccagatgcggtggctcatgcctgtaatcccagcactttaggaggccaaggcgggcggatcacttgaggtcaggagtttgaaaccagcatggccaatatggcgaaaccccctctctactaaaactacaaaaattcgccgagcgtagtggtgcatgcctgtaatcccagctactcgggaggctgaggtaggagaatcttgaagctgggaggcggaggttgcagtgacccaagatcacatcagtgcactccagcctgggggacagagtgagactccgtctcaaaaagagaaaaaaagaaaggttcttttattattggaagagaaacagatgatgaaggaaaggagacatattcaagttcaatgccagatctgaaaatgtcatgtgttgtcagtattgagaaaaaaatatatagactctaattcacaaacctaactccaaggctaagtcctcaaagaggaaagcaagtggaggacttaagttacttaaagtgcgggatacagctgcgggcagtagcacatgcctggggtccccactacttgggaggctgaggtgggaggatcacttgagcacagcaggtccaggctacagtgagccatgatcacacagctgcactccatcctgggtgatggaatgagaccctgtatcttaaaaaaatgaaataaatacagaatacttatttaaaacatgggccaggtatagtggctcgtgtaatcccagcactttgggaggctgaggtgggcggatcacttgaagttaggagtttgagaccagtctggccaacatggcaaaaccccatctctacaaaaaatacaaaaatagaaattaaactggcatggtgatgcgtgcttgagctcccagctcgggaggctgggcacgagaatcgcttgaacccagaaggcagagggtgcagtgagccaagattgcaccactgcactccagcctgggtgacagagtgagacaatacctgaaaaacaaaaaacaaaaacaaaaaaagggaattcgcagaaatctaatgacaatgacagaccctccccatgttttatttctaatgataatcttgtgagggaaacttaacattaccaacctaaagaagacccttgaagcgcagtggggaaagcacgggtgtctccatcacactggtctcctgggtatccacgtagagaggatgagcctcgaccacccccacacacgcacacaccatgcacttggatccacgtgacatggactgtggatgtaagaacgtgaaaggtaaaacaaaattctagaagaaagcacgggagaaaatcttcatgagtaggcatcgatttcttccacgggagccaaaagccactaatcacaaacaattgagaaattagacctcactgaaattaataacatctgtttattaatggacacgctgatggagacagtgaaaactcctcatagatgaggaaaagacaacacaatttaaagctggacaagagccgggaacagacgcctccttacacaggacatcccaggactaatcaatgtggggaaaggtgctcacgtcattgcattagcatcacaacttcaagaaaatgctcgttaaaaccagagtgacttgcaccagcacccgccccagaacggccgaatgcccatcagtgctggcaagtctgaagcagtctggcctcacaccctgcgtgtaggagtatgcagctctttggcaatctcttctgttttgctttgtttgtttttaaccatcgaactgcagaagataatattttctgaggctcagcctgtacataccctctgacccagcagcctgcagccctcgttctacccaggagagctgagtgcatctgtccacaccgacagacgtgtccatagccactttggtcataatctcccaaaacaagaatcagcccagtgtccatctacaggggcatggatcagtggaggcctaatcgtacagggccccaaacagctgtgaaaacagacatagtactgctacctggaagaagcttacattttgttgagtgaaagaagccagacactaaaaagggcatactggccgggcacggtggctcacgcctgtaatcccagcactttgggaggccgaggcgggcggatcacgaggtcaggagattgagaccatcctggctaacatggtgaaacaccgtctctactaaaaatacaaaaaattagccgggtgtggtggtgggcgcctgtagtcccagctactcgggaggctgaggcgggagaatggcatgaacccaggaggcggagcttgcagtgagccgagaccgcgccacggcactccagcctgggcgacagagcgggactccgtctaaaaaaaaaaagagggcctactgtgtgcctccagttctgtgagggtcagaagctgatccacagtaatggctgccaagcagtgcttaccttgagagagggaatagcaggaaagccacacgacgagccttctaggatactggggatattctctctatagatctggatgtgtatatgatgtgtacattcaccaaggtgtacacatgagatatgtacacttctctgtattccattacaccttggtttttgaaaagacagaaacagcatgctcagcttattaagaacctgaatattttcagacaaaaagtatgtctagtgttagtccacttttttttttttttagttttagactcacagagccctcttagggtcatatttagttgtatatcatctgacaaaagagggaatggctcacccagctgctacagtcagtcttgtagcctttgtaagatttgatgataaatcatacaataaattaaaactttcggctgggcacagtggctcacgcccataatcccagcactttgggaggccgaggcggaggatcacttgagcccaggagttcagatgagcctggccaacatagtgagactctgtctctatttaaaaaaaagaagaaaaaaaaagtctgggtgtggtggctcacgcctgtaatcccagcactttgggaggctgaggcgagcggatcacaaggccaggagatcaagaccatgctggctaacacagtgaaaccccgtctctactaaaaatacaaaaaattagccaggcgtggtggcgggcgcctgtagtcccagatactcgagaggctgaggcaggagaatggcgtgaacccgggaggcagagcttgcagtgagccgagattgtgccactgcactccagcctgggcgacagagcgagactccgtctcaaaaaaaaaaaaaaaaccccaaatcttaactcttactgctaagtgactgctttatcgaaactgttctgtttcgggacatttgattctggtagagattttgagacctgctttgaagaggacaccaacatttcagtcacacagcaatgctcctgtcttacctgggatccatgtgggaggatgcctcagtgggggatttgatctgtgttttcaatttaacctcacatcttactggaatggatggattcacagacctgggggtcgcccattggactgggagtaactacgttggaattacaagtaggacaacaaagatgactattaaagaaagcctcctgagtgctggaagcacagcaggcgtgggtctgtccactcactgtaatgtgatttgcacaggaaaacatcacatagggcacatcaactcaggaaagatagtcgttgaaaagctacctcagctgggcgtagtggtcacgcctgtaatcccagaactttgtaaggctgtgaggcttgtggatcccttgagaccaagagtacgagaccaacctgagcaaaacagggagaccccgcctatgcaaaaaatacaaaaattagccaggcgtggtggtgcactcctgttgactcagctattcaggaagctgaggcagaaggaccacaagaagtcaaggccgcagtggggtataatcacatcactgcactccaccatgggtgacagaggtgagaccctgttgcaaaaaaaaaaaaaaaaaaagcaaaagaaaagctgcctccatttagcaataatttcaaacatgatgtttgggtacaaaattggtgtacttaatggatatttctgatattcttaactaaatttgaagctgtgagggaagacaaactcagggtccacagggtgggaaaagtccacaagatcaccctcaagtgccgtcattctctaggaccccgagagccctagcggttgttacgcttgcagttatgatttattacagtgcaaggctacagattaaaatcaaccaaggcaagagatgtatggggcctcttgggggccaaggtgggcggatcacttgaggtgatctggacggttccagacacagggctttcctttgtctcctccctgtggagttgaagacagcgctgatgttcccggtgacgttgacacagagcactgccaaccagagaagcctccgtgtccagaggtttttttttttttttggagatgcagtctcactctgtcactcaggctggagtgcagtggcactatcttggctcactgtaacctctgcctcctgggttgaagtgattcttctgcctcagcctcctgagcaactgggattacaggctcgcgccaccacgcctggctaatttttgtattttttagtagagatggggtttcaccatgttggccaggctggtctcgaactcccgaccttaagtgatccgcccgcctcagcctcccgaagtgttgggattacaggcatgagccaccgtacccaccctgtgtccagcatttttactgggacttggtcacaaagacacagctggctacccacgtggctgacctccatctccagcccctctgcaggtgagcagaaactacatagcccaaagccccaacctaggactggtcccagaccccacgtaaacaaagacagccattaggtgtgacattctaaggactcagagatcacctcccaggagccccaggcaaaagccagacctcatttggggcgaagttacattcttttttattattattattatttgcccatcattgtctagaagttacattctgtatgacacatctgtcagatccctggaagcttcctcgccaccgactgcatggcaggtggtgctcatgtcactcggcccttccttggccccacacagctgcaccaggctgagaagagcttgaatggaataaagtcagacacagctaacagctcacttttttgtctccaactttgaattgctcctttccaagaaaagaaaaaaaacttctttttgtttaattggatttttttttttatttattttttgaggcagagtctcactctgtcacccaggctggagtgccatggcacaatctcggctccctgcaacctccaccttccaggttgaagtgattctcctgcctcagcctcccaagtagctgggattacaggtgcacaccaccatcatgcctggccggaatttttgttttttagttggctctccagaaccctctaagtagttcagctctgcaattgagttaaatgtgaagcctgaaaagagactggcatctgtgtagacctgagttctaacaattcaaagagtgaacacgggacgttgtcctctggattcggtgtcaggagcctgcctcgccgagctggagagtgtgcccatgactgcaggtgggagccacatggtccgtctaggtggcgacacctgaggacagaagtggtttagctgggcacccgctgctgtgttggggccagacccttttggagaggcagggacgcccttcctgtcaggtggaatcttttcaaatattgcttttgatcgttggagatacttgcagccccctagttcgtgttttattctggcagaattgtgtttgacgtgacctctgtgttgacctcatcatacgtgtacagttgtcttgcctgggaatcttatactctgttcttctgcactcagattcacagccatgaggccgctcctcccaaggccctggagtgtggcactgccagctgtcacagccacggtcctttacattgtatacacagagtgcagtgacatgcccctcctgctcaggggccacagtaggaacaggctggagtgttctgtggtaccatgccggcagtgctggcttctgctgtccaggggcttgtggtggctccagtgggaagggccacgtaagcagaacaggaagtgtgagcagtgtccactgggaggagagggacaagtgtcccaggcagagaggacacagtgcatgcagaggctggagggaggctaggggcttgagtggggctgcgccagcaccaggggcctcacaggggccctgggccacacacctgcccttagccaagggcgtttctccttggtggtttgaaatctcaaaccacattgaggaacctgccagaaatcgaaaccagaattaagaaattaagttacatgtaggagattttactttaaaatcagaacatgcagaaacgttctctgtggcttcgggtcaggttcgggcttgtggggctgtacactgccagttgataccttcttccctgggttctgtgtttttttttttttttttgagacagagtcttgctctgtagcccaggctggagtgcagtggcacagtcttggctcactgcaacctctgcctccctccctgggttctttatagcagtcagcagctggtggctgaggcatttggggcactgtgtccaagtgtcaaggccgcatgtgtgtcagggggcacacccttggtgtgcttggtaagggctcagagaagggcatctgctggtccatgtgggctcagccagcagcctgctaaagaccaccccgccagccaccagcctgcctgcgacagtgatagggcagagatgctgctacaataaagaccatgcgggccaggcgcaggcgctcacatctgtaatcccagcactttgggaggccaagccgggctgatcacttgagctcagaagtttgagaacagcttggccaacgtggcaaaaaccccgtctctattaaaatacaaaaattagccaggcatggtggcactcgcctgtaatcccagctacttgggaggctgaggcaggagaatcgcttgaacccaggaggaggtttcggtgagccaagattgcaccactgcactccagcctgggtgacagtgagactacgtctcaaaaaaaaagactgtgctagacggtggtgttgaacttgaacttgatgcttgtgctgaggtcaggagacacgtgcacagcttcagggctagaggggcacaatggctgcagactatgctcgggcagctcggaaagacggtgacgggtccaggctgccgcagctaagcctcacaagagctctggccccaccaggcgggccctctgggttccattcccactccccactgcctggaggcagcagccctgtggttactgtaggagggacctgaatgcagtgaagatctgcactccacacctgtctctgtgcctcagtctccacgtctgcagcacaggggcctgactgaaataacgtggccaggcacacagcccagacgccagcactgtgtgcactgtgggaggggacgatggtccctagcccagggcctgagctgctgccttgccaattcgtggtgacagctttggcctgggtctggcaggggctggctgctactgctgaaggcctgtctgcactgtttccctgcctttccacaagcactgtccctcctggctcttcagagttgagtggttataccttgtgcaagaaaaacaatgaaacagattgtctgaatgtttcagacctgcctgaaacattctgcaggagaggtcatcccaaggcttgaaagtgtttgtcacactccttcaagcccccagggcagggcccctgagggaagggtgcaggtggagggtgggcaggagtgggagccattccttggggacaggggggctcctcagggctgtctggcccttggcctgtggttccaggtctatggtctgcttggcacatagcctggaccctggtgctgtgcaggcactggctggatgagggcaccgagcagatgagccccaggcatgcccacttatgggcataggctgggtgcagggcactgggtccaacataaccatggcagagggctcagggggcctaaaagtcatggatggagttgcccacgcagcctgcggtcaggttccctgtggagccgtgctggggttctgcgcctgccccaggatttgctggaagaagctccccctcctctgtttgtgagtcgggccctacccccaagtctccccctcagtgatagagacctttacataacacaaataaacaaggcaactggtttagaagaatgagtctgaaaactagaatggcgtgtttaaggaaagcttaggacaggacaattagagacagaggtgcaggtgtgtggagttggcagcaggaggcctgggggagccgctcgtgcctttccctcctgccctggcctcccttggaactcggagcagccccctgccttgaggaggcccttcctttcagtgagcctgtgccgcagtcgtccgagggaacacagtggggacatatttccttttttttttttttttttgagacagagtctcactctgtcgccaggctggagtgcagtagcctgatctcagctcactgcaaattctgcctcctgggttcaagcaattctcctgtttcagcctcccgagtagctgggactacaggcatgcaccaccacgcccagctaatttttgtatttttagtagagatggggtttaaccacgttggctaggatggtctcgatctcttgacctcatgatccgccagcctcggcctcccaaagtgctgggattacaggagtgagccaccatgtccggccggaaatgtttattaaaatagcagatgaggccgggtgctgtgactcaggcctgtaatcccagcactttgggaggctgaggcgggtggatcacgaggtcaggagttcaagaccagcctgaccaagatggtgaaacccatctctactaaaagtacaaaaattagccgagcgtagtgagacttgcctataatcccagttacgagggaggctgaggcaggagaatcgcttgaacccaggaggcagaggttgcagtgagccgagattgtgccactgcactccagcctgggcaacagagcgagactccgtctcaaaaataaataaataaaaatagatgatcatagacaggagggatgaagtagaagattcaaagcagcttaaaaaaaggaagtaaaaaagaaataaggtcaggagacaagattgagtgactgtgaaacatcaacaataggcagatttaaaataaagtcaggaaatagctagatcaaagaatagaaaggtgaaccaggtgtgatatccacctgtagtcccagcttcttgggaggccaacgcgggaaaatcacgtgagcccaggagttggaggcaccgctgcactcaagcctgggtgacacagtgagaccctgtctcaaaaagcagcaggaagagaggctggcatgtggggctccagggggtgtgaaggagggtccacaccctccttcctccacctggccatactgagcagcacattctctgagccaacggcccctacaaacacccaccctttcctcctggtagcccagagggcgcccctgcctgctcacttcccaatgtcgggatcctgtgatttctgcctcttcagaaaggacttgaggcattttctgactcagagccactcaggattccaggacctcctgtggtgacaacagggacaccagtagtgatgaattcagaaaagagcgaacgcccctcaagctgccctcccccagccctgcagacagtggccatgggcctccctgcactcaggaccgactgcacctgcctgcggcgtaggggagctggggctggcctttccttttcatcttcccctggcactgggaaatgctctgggtggtgccatgtataacaccctttgtcacagtgctctcatttcgtcgtgtaaaaggccagtccccgcctcgcagtgttggggcagccagcacaggcacgtgagacaggagccacacctgggttctcatctggcatctgcctcttgccatgctcaggttcttgcctccagatatagggcatcaaactaagtggtttccaaacttgggttcttggtggggagtgagatcagggtttcttaaaaactgcacttggaggctgggcacggtggctcacgcctgtaattccagcactttgggaggccgaggcgggcggatcacctgaggtcaggagttacaaaaaacggaacctaggctcatgcctataatcccagcacttcgggaggccaaggctggcgaatcgctggaatttaagagttccagaccagcctggccaacgtggcaaaaccctgtttctactcaaaatacgtaagttagccgggcatggtggtgggtgcctgtaatcccagctactcgggaggcggaggtttcagtaagccaagattgcaccactgcactccagcctgggtgacagagtgagactccgtctcaaaaaaaaaaaaaaaaagaaagaaattcaaatctcagtgtcgataaatgaagttttgttggaatgcagccaaagcccaccgatttctgcgttgtctgtggttcccttcatggaacagtggcagaactgagcagttgcaacagaggcaggcccagcaagcctcaaatatttacactgagctgagcgcagtgactcacacctgtaattccagtgctttgggaggctgatgtgggaggatcccttgagcccaggagtttgagaccagcctgggcaacctagtgagaccccatctctacaaaatattttttaaattagccaggtgttgtggcgtgtgcctgtagtcctagctacttgggaggctgaagcagtaggatctcatgagcccaggagttggaggcttcagtgagctaggatggcaccactgcactctagcctgggcaacagaacaagatcgtgtctgtaaaaagagagaaaagaaacagacaattcctagactgcagcaggtgtttgcagtagtgcatccagcaaaggactccccagggaaggaaatgggccaaagatgggaacaagcgctgcttggaagagcctgtgaaacagtgcttggcttctctgcacaacaaggaaacgtgtttagggccacattgtagaatggctacaaggacaagcaccactcacgctggctcagtatctcccaagtagagcatttccccaccctgtgacctagagtatcttctcccagataaattcctaggagaactgcaaactaaacacttgttcctgagtgtccacagacacttgcttcctggtgtccaaccctgagcacagcccagatgcccggcagcgggaactgggcatggctggtgtgtgcccacctcgggacctgctgctgcactcggcaacagggacagcaaggaggcaggaggccaggccaggtttgggggctcccctgtgtgtttctgcatcatcaacttgaagaagcagccaacctcggcccaggatcatccctgggggaaggactgacaggagcgcatctttagcctcatgcttaagatctgtgcattgggccaggtgcggtggctcagcctgtgatcccagcacttttgggaggccaaggtgggtggatcaggaggtcaggagttcgagaccagcctgaccaacatggtgaaacccgtctctactaacaatacaaaaattagctaggtgtggtggtgcacctgtaatgccagctacttggaggctgaggcaggagaatcgcttgaaccctggaggcagaggttgcagtgagccgagatcacgccactgcatgatgtgtgcattggtgttaagtcagctattaagaggtgtgggctgggtgtgtgtgggggtcagaggaggtgatgtttgccctgagatgaggtcagagcccacattcccatgggggtggactcccctttgtaggccttgacacgagcatgggagcggagctaggggcactgacatcaaaggtggtggcgcctatccagaggactccgggtttcattccaagtgcggggaggctgcagcatgtccctctttaatatagaggtgagggaggctctcagcaccctgcctgttgcagggaagcctgaggacaggacctccagggaactctgcaccagagcggaatcctcagaccggcaactgggtggtcttgattcatccagaacgtaattctcctagaggtctgggaaggggtgctcttgtaccttggttttgtgttttgtttttgtttgttttttgagacagagtctcactctgtcgcccaggctagaatgcagtggtgcgatctcggctcactgcaacctctgccacccaggttcaggtgattctcctgcctcagcctcccgagtagctgggattgcaggtgcctgtcaccacgcctggctcatttttgtatttttagtagagacggggtatcactatcttggccaggctggtcttgaactccggacttcgtgatccacccacctcagcctcccaaagttctggggttacaggcgtgagccactgcgcccagccgcaccttgttttttttttgctgcctgtagctgtttctcattagcctgatggaggtggctgttggggtggtggggtgcttattataaagccttctgctgtcacagccctggggtctcacttcctgggctctctgcatagggagccgccctccagggcaagggccacagtgtgcagtaagccccccatggccacagggcagggcgtttcaagccaagagtctgcactgtttgctggccactaagggcattgaatggatcacaaaactggcttttttttcccccagtcaaatagaaatggggttttgccatgttgtccaggctggtctcaaactcctgggctcaagcaatcctcccacgttggcctcccaaagtgctgggattacaggcacgagccaccatatctttaaaaatgtaatagaatggaaaatggcaaagcgcgctgcttttcatagaagagactatcgcattggggttcttctgttgcccctgcctgtgctgcacgtcctgcttcacagtgtaaagcgcaactcttgctgtgccttattgtaacaggtatagggtggatgctgccatcatgaagagagaggagagctctttgcttataaaattccgtagagtggagaacaggatgtgccggcttaggagagggaagaggtacaggcccgctctgcccgagctgcagatgggacacacatttcccgactcagaggggagtcgtgtctttctccagggtcaccgagcagcaagcgcatccactgtgtgttcttattttctgagcctgtggactgggtttaccaacagttgcctgtggcagagccggccaccagcccgctcataggaaaaaggaagcctgtgcctccagggagggcccacgatgggaatgcagtctgagaagggtatgtgctcccatgctggaccggctggtcccacacccaggaccaaaaacacctcctggcaggagatggggagatgtacttcatgaacacacgttggggaaggacactcctggaaggcagaggctcaaggcgggctgtgtccaggccaggagattcactcccacctcaatttcctcctcagcacggctggcctggcactggtgcctgcttcagagtttagtgtgtgtaaagtgtggctggcccagcaagcaggggatgatggcggttgtcaaggccaggggaggtgcagggacaggattctggctcccgtgtgtaacgtctgcatctcaggaggctctcatgttagaagctgggtcaggggcttcgtgatgcacacaaacaccaaacaagcaggaggccttccgggatcctgctcacgagcagcttcctggaggcaagcctggcccgtctgccccttggtgacatcaggaccccagcaacagaaccagggaagccaccatgttgtcgctgccattttccagcgtggtaaacagaagcaagacaaggcgcactcaggacacccaaacagacggcggggccagccagtggcatgggcgggctgccctgccctctggaattttctgggaaagaacataaggaaagaagcggtgctgatgaggcagctggagttatcaggacccaagctcagctcctccttcccatcaggccccgttggccacttttaggcttcgtccgcctggtggctccctgcttggggccgttccctggctaggcccttcctctgggccaaagcagagaggagagcgcgtttgccatgcgttctcattttcccagcctgcgggctgggttctgtcagagcaaggtcagctctcagagcttctgtccccacccaccctgtcctgctgagccaggctcaggtatgggtaagagctgggagcgctgtgcacgaggcctggcagcatctcatcactgccgctgtaccgagtgcacaagggcgcttcctgtggtgttcagggggttagatcagtccccagtgaggacagagcagagatccagatgcatcccaggccggctgcagtggcttctgcctctaatcccagcacttcgggaggccaaggcaggcagatcacgaggtcaagagatcgagaccatcctgaccaacatggtgaaaccctgtctctactaaaaatacaaaaattagccgggtgtggtggctggcatctgtaatcccagctactcgggaggctgaggcaggagaattgcttgagcccaggaggcagaggttgcagtgagccgagatcattccattgcgctccagtctggcgacagaacaagactctgtctcaaaaaaaacaaaaaacaaaaaaatgtatcacaggcctgtttgtgtggttgtctctgggaaatgttccagaagctacaagaaagcacatgtgcaggccaggcatggtggctcacacctgtaatcccagcactttgggatgctgaggcgggctgatcacctgaggtcgggagtttgagaccagtctgaccaacatggagaaaccctgtctctactaaaaatacaaaattagcctggcatggtggtgcacgactgtaaaaaatcccagtgactccaaaggctgaggcaggagaatctcctgaacctgggaggtggaggttgcagtgagccgagatcgcaccattgcactccagcctgggcagcaagagcgaaactccgtctcaaaaaaaaaaaaagcgcatgtgcaagaaatagctcctgagctgagttggaatttctcatccttaaacaatgtgggaacctgctgaggtggggtgggggctcccgggtgggcggactcgggggtgatagccgccggttctgccttgcagcagcagtggacgtcagctcagcgaggtcttcatccagctgccctcgcgaaaggagctgcccgagtactacgagctcatccgcaagcccgtggacttcaagaagataaaggtaaccctgacgttgtacctgcgccccgcatgtgcccggaggggagtctgacccaggggcacccccatctgagagctgtggtgtgtgggcagaatgaccagaaaccacctaggcggtgccttgggctacctggttagggacctggtcgtgggcttttggggttccttgtaagggttgggggtgtcctgagggatgtcagtgggcagtcggtgttgggtgttccttcaaggtcccactcacttagtgctgggcctcagtcatgcagttcccatgcctagtgagccaggttaccgaggctggcgcttcggccacatcctcataggcacgaggaatcctagcccgtggggtctccagcacacagccaggcctgcgggcaggcgaggcggggtcctgaggtaagacctgctcctcccgtccactgcaggagcgcattcgcaaccacaagtaccgcagcctcaacgacctagagaaggacgtcatgctcctgtgccagaacgcacagaccttcaacctggagggctccctggtgagggcaccgctgggggttggggatgggccactcccacagctgggctttgacccaacccgcccctccttcccttctgaattgatgggttaaaaacaagtcccgctagctgtggtggttcgtgcctgtaatcccagcactttgggaggccaaggcgggaggatcacttgagaccaggagttcacgaccagcctgggcaacataacaagaccctgtctttaaaaaaaaaaaagaaaaaattaaaaatttccaacttgggatattttagcaattacaaaagcagtatgtatttaccgaagaaaataaagataggcacaacagaagaaatagactcagagtcctctgtctgttggaattttattttaaattccctggggcacattctcttcaaaggaatcctgtgggtttgttctttcctgtgatagaattgacacatacacagcctcaacttggcaaactttcttaagtgtctttgggattgattcctctcagaaaaaagacttgactttgatgagtttgggaaagatgctggcttcaacaaggggcatgtatttccaatgttattgcagacctcagagattgtgcagaaggagggaggcacctgcagctattcccaaaccagtgtgcctgacctttcaccctggagcatttcagaagtctgatgctcgggcccctatggaggaagattatggagagggccttccaccctgggtgggctgaagccccgacccgctgaggctcgcattggccactgatcagctgtccaggggcaacacagggctggggctggggctggggccagggccgggcaggcagccctccagtcgggcccatccactcaagcccctggtgtctctgcccagatctatgaagactccatcgtcttgcagtcggtcttcaccagcgtgcggcagaaaatcgagaaggaggatgacagtgaaggcgaggagagtgaggaggaggaagagggcgaggaggaaggctccgaatccgaatgtgagtcccgggggggttcaggacgccggggttcacgctggcccgagagcccccaaggccccagcttttcacagccctcccggctcccagacgccccttgctgtgggggtgctgcattcccagagctcaaggctgtctttccctcccggtcccctccagctcggtccgtcaaagtgaagatcaagcttggccggaaggagaaggcacaggaccggctgaagggcggccggcggcggccgagccgagggtcccgagccaagccggtcgtgagtgacgatgacagtgaggaggaacaagaggaggtgaggccgggcccccgagcaggcagagctggcatgtggcaggaggcatcccggggccctgatgggacagccctgtggggcggtgctcccacgcccccacgctgcaggtgggaaagctgaggcttgacctgccatggctgaccccaggtcacacagccagtatgtggcagggctgccactcaaagccaagcctgtgtgaccccggaaccagctctcagtacccgtgggtgtctggggactgggggacacgtgagtcctcaggacaggcagcaggcggtcccagggcaccagggctcctgggctgaggccgggcaggccagggcttgattagggttgggtaggaggtgctaggattggggacccaccagacagtgccccgtctcctcagtggcatagagaatgggcagaaacgccaagaccacagtggatagtttttggggtgcagtggggagccggagaagatccacttgctggctttaaataatctcacctctgtctctggcccttcctggctgtgggacctggcaggtcactttgcttctcaagcttcagtttcctcttatgcaaagcaaggaggctgcatggattagggggctgcccccaccgaagggcctggctcccgctgaagcccagcgaatgccattttgtcatcacagaagcagcaaatttcagtgcctgggaattagtctgacgaaagacgcacgtgacgtttgaggacattcatgaagtcctcatgtggaggggaggcccctgtgtcaggcaggagggtctgggctgtgatgctgtctctcttgcctaatccagagcagggtgttttatggcccatgccaggctgtttaaaaaggttttatgaggccaggtccagtggctcacacctgtaatcccagcactttgggaaactgaggcaggaggctcacttgagcctgggaggtcgaggctgcagtgagccgtgatagcaccactgcactccagcctgggcaacagagcaagaccctgtctttaaaaaaaaaaaaaaaaatatatatatatatatatatatatatatatatatatatgaaagagcaaagatctttcacagtcaggaagaaccaagatggtttggaagctgtaggtcaggggccaagggccaggcaggtgacatgggacagagcagggaaggcacgtggagcctcgaaggtcccgagagggccgagtgtggtcacagggactcgtcctgtagagaaacatgaagtttgggcatggccatggcgccatctcggctcactgcaagctccaccccccgggatcgcgccattctcctgcctcagcctcccaagtagctgggactacaggcgcccgccaccacgcccggctaattttttgtattttttagtagagacggggtttcaccgtgttagccaggatggtctcgatctcctgacctcgtgatccgcccgccttggccttccaaagtgctgggattacgggcgtgagccaccgtgcccggcccacatcagtgttttcttgagcaagtttatttaaagtttggcaggtccctggcaaggtgccctggcaggggtggccaacgcacactctctcctcctgtcccctctccaggaccgctcaggaagtggcagcgaagaagactgagccccgacattccagtctcgaccccgagcccctcgttccagagctgagatggcataggccttagcagtaacgggtagcagcagatgtagtttcagacttggagtaaaactgtataaacaaaagaatcttccatatttatacagcagagaagctgtaggactgtttgtgactggccctgtcctggcatcagtagcatctgtaacagcattaactgtcttaaagagagagagagagaattccgaattggggaacacacgatacctgtttttcttttccgttgctggcagtactgttgcgccgcagtttggagtcactgtagttaagtgtggatgcatgtgcgtcaccgtccactcctcctactgtattttattggacaggtcagactcgccgggggcccggcgagggtatgtcagtgtcactggatgtcaaacagtaataaattaaaccaacaacaaaacgcacagccttgcctgcaggtggacttgtgcctggctcccaccgtttctgccagcaggagtggcgggggccacctcatgtccaggtccctgtccttctcctggcaccagaacccatggggcccgtttcacagaggaggatactgaggccccggcaggggaagaggacttgtctggtcacgcgtgtggcctttgccactgcaggtctccagcatttgttcagctgagacctacagtgcagggagcaggcagctccatccgttccctgcccgtggcccagcctgggttggggagaccatcacagaaatgggcagatgccacatagagctctcagggccatgatgcaggaagctcagggcataatgggagcccaggtggtcagtgagggaagggacggagccgcctgctccctttcaaatccagaacataatttgagtttttgtttttttgttttgttttgttttgtttttgagacgaagtctctgtcacccaggctggagtgcagtggcatgatctcggctcaccgcaacctcagcctcctgggttccagtgattctgctgcctcagcctcctgagtagctgggattacaggggtgcgccaccatgcccagctaatttttgtatttttagtagagatgggtttcatcatgttagccaggctggtctcaaactcctgacctcaggtgatccacctgcctcggcctcccaaagtgcaaggattacaggcatgagccactgtgcccagcccctaatttgtgtatttttagtagaggcagggtgtcaccatgttggccaggctggtctcaaacccatgacctcaagtgatccacccaccttggcctcccaaagtgctggtattacaggcatgagccaccgtgctttgagtttttttacagtaagtcttggccggagtgcagtggctcaatcttggctcattgcaacctatgcttcctgggctcaagcaatcctcccacctcagcctcctgagtagctgggattataggtgcacgccaccatgcccaggtaatttttgtttttgtttttgtttttggtggagacagggttttgtaatgttgcccaggctggtgtcaaactcctgggttcaagcagtccacccgcctcagcctttcaaagtgctgagattacagacgtgagccactgtgcctaaccaatttgaattcttatcatttttgtctgttcattaagagccattattagtgggtcactgtcgtcatacttggctttaattcttgagatgtggtttcttctagctctttgaacctttttttttgttttgtttttaattgagacaaggtcttgctgtgtcacccaagctagagtgcagtggtgtcatcacagttcacaacagccttgacctcctgggctcaagtgatcctcctgcctcagccccctgagtagctgggaccacaggtgcacaccagcacacttggctaattattattattattattttttttgtagagataatgtttcgctttgttgcccaggctggtggtctgaactcctgagctcaagtgatcctcctgcctcagccgctctattttttttttttaatcgagacatggtattgctctgttgcccaggctggagtgcagtggtgggatggtagctcaacttccagagctcagatgatcctccctcttcagcctccagtgtatctgggaccacagacatgcaccacccagcccagcttgaacctgtttttagtagctgctttgaagccttttggtccaacatccggatccattcctccacagaaaggttctgttgactcctttttgtcctcagcgtaggtcacactttcctgtttcttcacatgtctggcaagcttttgttgtcagaaagtagacattgtatttttatttatttgtttttaattttgttatgtttttgagatggagtctctcactgtcgcccaggctggagtgcagtggtgcgatctcggctgactgcagcctccgcctcctgggttcaagcgattcccctgcctcagcctctggagtagctgggattacaggcacccgccaccacgcccggctaatttttgtattttgtatttttagtaaagacggggttttaccatgttggccaggctggtctcgatctcctgacctcaggtgatctgcccaccttggcctcccaaagtgctgggattaaaggcgcgagccaccgcgcctggccttgttttgttcttaattgttgtttttcttttctttctttcatgtttcccctcggagacaaggtcttgcgctgtcactgatgctggactgcagtggtgcagtttcagctcactacagcctcccgggctcaagccatcctcccacctcagcctcccgagtagccggaactacaggcttgtgccaccacacccagctaattttttttttttttttttttttttggtagagacagggtttctccatgttgcccacggtggtcttgaacacctgggctcaagtgatctgcccgcctctgcctcccaaaatgctgggattacaggtgtgagccaccgcgcctggcccaattctcatttttatttagaaggagtcacccctgggtcagccaagctgagacatcagttggtggttggtcagaacttgtgcccaaatatgctgagtcagcggctctgcccgggcccaaatgctgagtcagcacctctgcccgggcagtctgcaggctggccctacctttgctttctgcctgtggttcctatcagggcacgcacttcagttctgttgggcagggagacgtgcatcagactctctccagggcatatgtgctgtcttgcgcttgcgcgtggcctcccaaacccctagggatacctggggccagctggggcagtctctgtctcgacctccttttccatttctggctagtttaccaatctgtttcatccttaggccagctgatgaccttggccctctcctcccgagatccctgcagcttccaacagtgaggccctccagcagtgaggctgctgattttcatggcctggctggagctgggggcccaggccaggagcagccccaggcaaaaatcacctcccgctgctcttccctgccactcagtactttttctggaataaacatttcctcactgggtgaacacctttgacgagatcttcacagtcctgggatggttgctttggacaattctgtttagctttattgttgcttttagggagaggatttgccaagatcttcactccaccatttgggaaaatccacatttcgtttgttgcaatagctttggctttattttaatagattataatttatttattttttatttatttatttttgagacagggtcttgctctgtcacccaggctggagtatagtgacatgatctctgctcactgcaacctccgcctcctgggctcaagcaattctgccacctcagccttttgagtagctgggattacaggcgtgcaccaccatatctggctaatttttttgtatttttagtagagacaggattttgccacgttgcccaggctggtctcaaacccctgggctcaagcagtctgtccacgttggcctcccacagtgctgggattacagatgtgagccaccactcccagccagaatttattttaacgtttatggaaaaccaactcaccaaacctatgatttcatggttttcagaatgaggccaatttaaaaataagtgccttagtctgggggtgttggcccatatccataatcccagcactttgggaggctgaggcaggaagattgtgaagattgcttgaggccaggaatttgagaccatcctagacgacatagagaccccccatctcaacaacaaaaataaaaaaattagccaggcacagtggtacacatctgtagtcctagctacttgggaggctgaggcaggaggatcacttgagcccaggagttcgaggctgcagtgagctgtgatcccaccagcgcactccagcctaggagacagaggaagaccctgtctcaaaaaaaaattttttaaggaaaattttttaagaaaaaaaatgaggggagcctacagaaataactttgagtgtccacctgtgcaaaacccatgtcatggggacacagggacatgttagctgtggtgcagatgagtggtccgggctgcaggcctgtctgactcaggtctcagacatcggctttggcctgagggcctggaaccagcttggtccccatatggcagtggccccaagccaggggccttcacctgtgtgacctggtgacagctgctggctggctgctgcccttcctgacctttgctctccacacctgcccctctcgcaggcctttcctctgtctttcagtcccgctggccagtgcccttctcccaacaaccccaagggctgggggacttcattcctgtttcccagatgacacaagtggagctcggggaggttgagccagtggcctaaggctacacagatctgagcttgggtttgggggacatgagactcctcaggggctgccacctgctctggggtctggagcaaggaccctgagacttgaaagttgaaatggcgcctggaaccaggtggtggactaagcaatggcgggcaggtcggtgtgtccccaggagtcaggagaggctgccacaagacaggagtgagcaggaccttaaagctgaaacgccggatggtcagggcatgatgggacctgacacggcctggactaggagggggtgggaagaataatacgggacatcatatgtggcagggggtcatgcgctttcccatccagccatctaggctggctctcctagattctttttgttttgttttgagacagagtctcgccctgttgcgcagctggagtacagtggcaccatagcctctcgagtagctgggacgacaggcgcgcacccacacccagctaatttttgtattttcagtagagacgtggttttgccatgttggccaggctggtgtcaaactcctgacctcaggtgatccgcctgccccatcctcccaaagtgctgggattacaggcatgagccaccaggcccggcctctcctagagtcttgcttccatcaagtcatggagtctccttttccttccctggagtttgagtgtacttgggactcactggtaaccaacagagttcaatggaagtgacatcatgtaactactaagagtaggtcacagaaagcacagcttccgccttgcttgctcgctcactcttgaatcaccagctgccatgtaacagcctgacttcctggagcctgccattttgtgaggaggcccaaccaagcccatgctataaggccaccaagaccacgggaagagaaagcaatggctgccccagccctagccctcagctgtcaccagctgcatcagagaccctgagcccgtaccgccgagctgagcccttcccacattcctgacccttagaaaccacaagagctaataaacacattgttttaagccactaagctgttaggcagcaacagtactggaacatcataaaataattttttaaatgacagggatctaattaaacgtggaaggatcttgagaacattgttgaggatagaacagcaggctgcacagtgaagcaaatgtccagcaagatggacacacactggatcctggatatgtgttctggaccatgtcactagtacatcacatttagagaaagctgtgtcaggacccaccccaaacacaaaacagcctgaactgctgctgttacccttggcagtgggggagggaagggtggcgttaagagattccccaagatggtgaggtcacctggccattttattttttatttttattttttatttttgtatatatatatatatatatatatatatatatatatatatatattttgagacagagttttgctcttttgcccaggctggaatgaagtgacgcaatctcagctcactgcaacttttccccccaggatcaagtgattctcctgcctcagcctcccaagtagttgggattataggcacccgccaccacgcccagctaatttttgtatttttagtagaggcggggctttgccatgttggccaggctggtctcaaactcctgacctcgtgccacccacctcggcttcccaaagtgctgggattacagacatgagccactgcacccggctgcctggccattttaagagccactttttgggccgggtgtggtggctcatgcctgtaatcctagcactttgggaggccgagttgggcagatccctttttttttttttttttttttttgaggtggagtcttgctcagtggcccagccatgagcgcagtggtgcaatcttggctcactgcaacctctgcctcgggttcaagcgattttcctgcctcagcctcccatgtagctgggattacaggcacgtgccaccatgcccagctaattttttgtatttttaatagagacagggttttgccatgttggccaggctggtcttgaactcctgatctcaagtggtctgcctgcctcagcctcccaaagtactggcccagtttctgtatgtttgaatagagacaaggtgtcactatcttgcccaggctgatctcgaactcctgagctcaagggatcctcccactgcagtctcccaaattgctgggattatagggtgtgagccattgcgcccagccagaacctcttcttgattcctcaccaatgttttggtcaacagcacacttggattctagtttctgtcatggtctcaaagatttctactgaaataagaccgttcttggtcgtgccttgtggctcaagcctgtaatttgagcactttgggaggccaaggtgggcggatcacttgaggcaaggagtttgagaccagcctggccaacatggtgaaaccccatctctactaaaaatacaaaaattagcggggcatggtggtgcatgcctgtaatcccagcaactcaggaggcagaggcaggagaatcgcttgaacccgggaggcggaggttgcaataagccaaggtcatgccactgcactccagcctgcccaacacagcaagactatgactcaaaaaaaaaaaaaaaaaaattcttacctgctggagcgttaatatgaatgaggtgtccagagcccagctcctcctgatccacccatgtctgattctgcttctgtgtccccacctcacaagtggccactggcctacaaggagtccatgtcagctgccatccctttccatcaggccacaccagccgatcccccctcacccactcattctccttcctaaatatcccctcaacccacccacctctctctccacccttgaccttcacctgcaccagcctcagcctatagctggcctagaccagcatggtcaactccttggtttctccgcttccacccacgctgcgctccatgtggccagagggttctaaactcttgcagttcctcaatgcacaagggggcctggtcagctgagcctggcacctgcccagccttctctaagcctcagctaaaattctataccacatacttctagacactggcatgcgcaggggcctgttgttgcaacccctcatgtggtgaatctccctcagagccctcagacatcagttcccgccccttcttgccttctttggtaatctggggcaggaagcacttggggcgggtcattgtggctcacgcgtataatcctagcactttgggatgctgaggtaggaggatcgcttgagcccagacgttcaagagcagcctaggctctacaaaaaagtcctacaaagctcagttttcaaagcatatttctggccgggtgtggtggtgcacgcctgtagcagccagctacttgggaggctgaggcaggagaattgcttgaacccggaatgcagagagtttgcagtgagcccagattgcaccactggactccaacctgggcgacagagcgagactctgtctcaaaaaaagaaaaaaagaaaacagaaaaggaaatgctagtgtgtatgctgaataaataagcactttgagaagttgacagggaggctaggcatggtagttcacacctgtaatcccagcacactgggaggctgaggcaggaggagcacttgagcccaggagtctgacatcagcctggacaatatagtgagacaccgtgtctacaaaaaaaaaaaaaaaaaattatccaggcatggtggtgtccgcctgtagtcccagctactcaggaggctgaggtgagaagataacttaggttgaggggggcaaggctgcagtgagctgtaatcccaccactgcactccagcctgagtgacagaggaagactttgtctctacaaaaggaaaaaagagaaattgacagaagagaagttcctcctacttctattttttttttttttttgagatgaagtctcactctcgtccaggctagagtgcagtggctggatctaagttcactgcaacctccccctaccatattcaagagattctcctgcctcagcctcctgagtagctgggattacaggcacccgccaccacacctggcttttttttttttttaaatagagacgggattttgccatgttgatcaggctggtcttgaactcctgacctcagatgatctgcccaccttggcaacccaaagtgctgggattacaggcatgagccactgcgcccggcctcttatttctttagaggccccaaaaaagaactgcaaagaagaaacacgagtgcattagaaaaactgttcaggctgggcacagtggctcacacctataatcagtttcagaggccatggcgggaggatcgcttcaggtcaggagtttgagacccccttggggaacatagtgagagtcctgtctttatttatttattatttatttatttatttatttatttattttcttgagacggagtctcactctgtcacccgggctggagttcagtggtgcaatctcaactcactgcaagctccacctgccgggttcacgccattctcctgcctcagcctcctgaatagctgggattacaggcgcccaccaccacgcctggctaatttttttgtgatttttgtagagacggggtttcaccgtgttagccaggatggtctcgatctcctgatctcatgatccgcccgtctcagcctcccaaagttctgtgattacaggcgtgagccactgcgcccagcctcctgtctttatttttaaaagaagggcgcagtggttcaagcctgtaatcccagcactttgggaggccggggcgggcggatcacgaggtcaagagatcaagaccatcctggccaacatggtgaaactccgtctctactaaaaatacaaaaattagccgggcatggtggcaggctcctgtaatcccacctacttgggaggctgaggcaggagaattgcttgaacctgggaggcagaggttgcagtgagccaagattgcgcctctgcactccagcctggggacagagcaagactccatctcagaaaaaaaaaaaaaaagaagaagaagaagaaaggggggaaaaaaagccgggtgtggtggctcaaacctgtaatcccagcacattgggaggctgagcaagaaggattacctgagcccaggagtttgagaccagcctgagcaataaaatgagaccttacctttacaaaagaaattcacaacttaggtggtcatggtggcacacacctgtgatctcagctactcgtgaggctgaggtaggaggattgcttgaatccgggaggtgaagtctgcagtgagctgtgatcacatcactacactccagcctgggtgacagaattagactctgtctcaaaagaaaaagaaaaaaactggttataaatcctcttaataagtaaatgatagctggacatggtggtgcatgcctgtaatcccagctactcgggaggctgaggcagaagaattgcttgaacccaagaggcagaggttgcagtgagccaagattgcgccactgcactccagcctgggcgacagaacaagactctgtttcaggaaaaaaaaaaaaaaaaaaaagacgttctcctatttattagcatactgttcacaatagccaaaatatggaatcaacctaagtgcccatcaatgtttgaatgaataaagaaaatgtggtgtatatacacaatgtagtactacactgccattaaaaagactgaaattttggccaggctcagtggctcacgcctgtaatcccaacactttgggaggccaaggcaggtggatcacctgaggtcaggagttcgggaccatcctggccaacatggtgaaaccctgtctctagtaaaaatacaaaaattagccaggtgtggtggcgggcacctgtagtctcagctacttgggaggctgaggcaggagaatcgcttgaacctgggaggtggaggttgcagtgagatgagattgcgccatccagccggggcaacaagagctaaatccatctcaaaaacaaaacaaaacaacaaacaaacaaaaaaacaccagcatcactgaaatggatcataaactatgttcttttattgaacagaccagaagaaacctactttaacctttaaaaaagaaaaaggaaagccaggcgcggtggctcacatctggaatcccagcacattgagaggccaaggcaggcagatcatgaggtcaggagttcgagaatagcctggccaacagtgaaaccccgtctctactaaaaatacaaaaattaccagggtatggtggtgagcacctgtagtcccagctattcaggaggatgaggcaggagaatcccttgaacctgggaggtggaagttgtggtgagccgagatcgagagccactgcactccaacctggcaacagagcgagactccatctcaaaaaaaaaaaaagaaaagaaaaataacttgcccaaggtcacacagtaaaagacagaggtagggtttctgctcattgtgattctaaacggctgtccacaaaatcaaagttaaggtaaaatactctctcagaaggccccgtaagggcaggtggcactttttctttgaagcctgtatgtcagaattgcaatcagttacaccaacccatttaaatcagtaggattgcccgggggtggtgagtggtggctcacacctgtaatcccaacactttgggtggccgcagagggcggatcacttgaggtcaggagtttgagaccagcctggccaacgggcgaaaccccatctctactaaaaatacaaaaataggccgggcgtggtggctcacgcctgtaattccagcacttggggaggccgaggcgggcggatcacgaggtcaggagattgagaccatcctaacacggcgaaaccccgtctctactaaaaatacaaaaaattagccgggcatgtggcgggcgcaggaggctgaggcaggagaatgacgtgaactcggaaagcagagcttgcagtgagccgagactgcgccactgctctccagcctgggtgacagagtgggactccatttcaaaaacaaaaaacaaaaaactaaaaactgtgtggtggttccctctccagaaaataagtggaattaccataggacccaagcagttccccttttgggtatatcaccaaaataattgaaagcaggatggccaggcgcagtacctcacacctataattgcagcacttggggaggccgaggcaagcagatcacttgaggccaggagtagttcaagtgcagcctggccaacatggtgaaatcctgtctctactaaaaatacaaaaattagctgggagttgtggcacacacctgtagtcccagctactgaggctgaggcaggagaatcgcttgaaccccgggaggcggaggttgcagtgagtggaaatcacgcgactgaactccagcctgggcaacagaaagaaactccgtctcagaaaaaaaaaaaaaagtgggagctcaaagagattatttgcatgtccatgttcatagcagcattattcatcacagccaaaaggctgaatcaacccaagagtccgtggatggaagaacaggtaaacaaaagatggtgtatccattcaatggaacattatttggcctttaaaaggaaggaaattctcactgagcatagtggtttatgcctgtaatcccagcactttgggaggctgaggcaggggggagggggcggttcacctgaggtcaggagttcaagaccagcctggccaacatggtgaaatcccgtctctactaaaaatacaaaaaaattagccgagtgtggtggcacacacctgtaagccaggctacacgggagactgaggcaggagaatcgctggaacccgggaggcagaggctgcagagagccgagattgcgtcactgcactccagcctgggtgacagagcgagactcttgtcttaaaaaaaaaaagaaggaaggaaggaaggaaggaaggaagttctgacacaggctccaacacagatgttatgctcagtgaaataagccagacatgaaaggacaaatactgcctgatctcattcataagaggtccctagaattgtagaatggtgtgtgccacgggctgggagggggtgtggccagagtttcagtttgggaagttgagaatgttctggagatggatggcggtagtggtggttgcacaactgtgtgaatgcgcttaatgcctctgaattgtgcagttacaagtggttcggatgggccgggcgcggtggctcatgcctgtaatcccagcactttgggaggccgaggcaggtggatcatgagatcaggagatcgagaccatcctggctaacacggtgaaaccccatctctactaaaaaatacaaaaaattagccaggcatggtggtgggcacctgtagtcccagctacttgggaggcggaggcaggagaatggcgtgaacacgggaggcagaacttgcagtgagccgagatcacgccactgcactccagcctgggcgacagagtgagactccgtctaaaaaaaaaaaagtggttaagatgggccgggcatgggggatcacgcttgcaatcccaacactttgggaggctgaggtgggtgattacgaggtcaggagttcgagaccagcctgaccaccatggtgaaaccccgtctctactaaaagtacaaaattagccgggtgtcgtggcacacgtctgtaatcccagctactggggaggctgagttgggaggatcacctgagcccagggaggtccaggctgcagcaagccatgattgcaccactgcactccagcctgggtgagagagtgagaccctgtctccaaacaaacacacatgaaaaacagattttttttgccaggtgcagtggctcacacctgtaatcccagcactttgggaggccaaggcgggtggatcacgaggtcaggtgactgagagcatcctggctaacacggtgaaaccctggctctactaaaaatacaaaaatttagccgagcatggtggtgggcacctgtagtcccagctactcgggaggctgaggcaggagaatggcatgaacctgggaggcggagcttgcagtgagctgagatcacgccactgcactctagcctgggggacacagcaaaactgtctcaaaaaaaaaaaaaaaggtttttttaatttaaaaaggaaagaaaaggagagtgctcgtgtggcaggcacctagccctgtccagcgcaccctgagacagggatgatgtctcctccttgacctaagaccacaagttctaaccaattcaaccgaggacagagccccaattccaggcagggcaatggggtcgccttgtgaactaagatgcagatggagaagagcagacacagacacaggtcttggggcccctgcaggggtttctcactggctttttccccctggattcctatgggttctggggaacagagttaggtcggctggcaagacagatgcatgaggctgtggcgcccttgacattgagccggagggccagagttcgtcattgctgacgcagagaagctgggagccaaggttagccagatggtttggaggagttttaaacaatcttttcttttctttctctttccatctgtctgtccttctttcctcccttcctgccccctttcttttctcctttctttccttcctctctccttcctccctttttttctttttttttggttttctttttgtattagtattattattttttagacagggtcttgctctgttgcccaggctggagggcagtggcacgatcacagctcagtacaccctcaaccttctgggttcaagcaatcctcctgccttggcctcccaggtagctgggactacaggcgtgtgccaccacacctggttaattttttttttttttgagacggagtcttgctctgtcacccaggctgcagtgcagtggcgtgatctcggctcactgcaacctccacctcccgggttcaagcgatcctcctgcctcagcctcccgagtagctgggattacacgcgcccgccaccaagcccggctaatttttttatttttagtagagacagagtttcaccacgttggccaggctcgtctcaaactcctgacttagtgatctacccaccttggcctctcaaagtgctgggattagaggcgtgagccaccatgcgcagccaatttttgtatttttagtagagatggggtttcaccatgttggtcagtctggtctcgaactcctgacctcaagtgatccacctgcctcagcctcccaaagtgctggaattacaggcatgagccaccgcgcccagccctcttaaccatttttaagtgcacagttcagcagcattaagcacattcacattgttgtgcaaccatcagcccccgtccatctccagctttctctttttttttgtttgttttgagacagggtcttactctctcgcccagtatagagtgcagtggtgcggtcttggctcgctgcaacctctgccttccaggttcaagctattctcctgcctcagtctccccagtagctgggattacagacacacatcaccacgccctgctaattattttgcatttttagtagagatggtgtttcaccatattggccaggctgatcttgaactcctggcctcaagtggtctgctccaaactgctgagattacagccgtgagccactgctcccagccatctgcacctttctcatcttcccaaatgtaactatgtccccgtgaaacactcactccccattccacctccccagcccctggcaccccccattttattctggtgctaggggaatttcaaaccaggcaagtctcaacacatgctcgagtgtaagaaccagcccacagcctcgttccctaatcacggtcaaaccagaattctactccaggttctactctgtgaatctgctttctgtgaatctgttactctggggaccgcctataagttgaatcctacagtgtctccacttcagtgactggcttatttcacttttctcctctttatttatgagacaaaatttcgctcttgttgctcaggctggaatgcaatggcgtgatctcggctaatttttttgtatttttagtagaggcggggtttcaccatgttggccaggctggtctcgaactcctgacctcagacgatccactttggccttccaaagtgctgggattacaggcgcggcccacctttctcctcttaatcacacaggtaatccatacatacgacattcttttttttttttgacacggagtcttactctgtcacctaggctggagtgcagtggcgcaatcttggctcactgcaacctctgcctcccaggatcaagcaattctcctgcctcagcctcctgagtagctgggattacaggtaaccatcaccacacctggctaaattttgtatttttagtagagacggggtttcaccacgttggccacgctggtattgaactcctggcttcaagtgatcttcctgtctcggtctcccgaagtgctgggattacaggaatgagccactgtgcccggccaatacgacatctgtgcaatgaagtgcaacatataagacacccttcccccacccactgcccccaccaccgcccccacgcccccacccccatctccagatcagaacctggggctgtgcaattttaaacgttgtagccacttgctacttgggtagttgaagttcagtctcagccaggttggagtcctggactctggcccctcttttatttttattttttatttttttttgagacagagtctcgctctgtcgcccagactggagcgcagtggtgcgatctcggctcactgcaagctctgcctcctgagttcacgccattcccccgcctcagcctcccgagcagctgggactacaggcgcccgccaccacacccggctaatttcttgtattttttagtagagatggggtttcaccctgttagccaggatggtctagatttcctgaccttatgatccgcctgcctcgggcctcccaaagtgctgggatgacaggagtgagccaccgcgcccggcctctttttttttttttagacagtctctgtcacccaggctagagtgcgatggtgcgatctcggctcactgcaacctccaccttccgggttcaagcgattctcctgcctcagcctcctgagtatctgggattacaggtgcctgtgaccacgcccggctgatttttgtatttttagtagagacggggtttcaccacattggtcaggctagcctcaaactcctgaccccgtgatccttccgcctcagcctcccaaagtgctgggattacaggactctggcccatcttggctgctgccaatgtccttccttctatcttggtttttccacagttacgcacatgccagataacggcgagtctgttccccagcaactgcaacggatctgcccaccactgggaaatggaagaccttgcagcccaggtctttgtagaccaagattagattgtggtcaacaaacacctgaccttggcctttggaaccatcagccatgtcagctaaaataaaagcagaatctggctgggcgcagtggctcacgcctgtaatcccagcactttggggggctgaggtgggcagaccacctgaggtccggcgttctagaccagcctgaccaatatgatgaaaccccgtctctactaaacatacaaaaattagctgggcatggtggcgggcacctgtaatcccagctactcgggaggctgaggaaggagaattgcttgaaccctggaggcagaggttgcagtgagccgagattgcgccactgcactccaacctggactgcagaacaagactctgtcccaaaagcagataaataaaaataaataaaaataaaaatatggccgggcatggtggctcacacctgtaatcccaacactgggaagatgaggcgggcagatcacgaggtcagggattcgagaccagcctggccaacatggtgaaaccccgtctctactaaaaatacaaaaattagccgggcatgatgctgcatgcctgtaatcccagctactctggaggctgaggcaggagaatcgcttcatcccgggaggtggagcttgcagtgagctgagatcgcgccactgcactctagcctgggcaaaagagtgagactccatcgcaagaaaaaaaaaaaaaaaagctgcaagctctgtctcccgggttcaagtgattctcctgcctcagccttccaagtagctaggattatacgcgcccgccaccatgcctggctaatttttgtatttttagtagagatgcggtttcaccatgttggccaggctggtctcaaactcctgacctcacgtgatccacctgcctcggcctcccagagtgctgggattacaggtgtgaacccctgcgcctggccaagaaaagttgcttgaatgaagagtaaatagaagacccagaaagaaatgattcgtccgaggaaggtcacagaagcaacgtaatcaagatggaaatctgactcttcctaattttggccagacttcccatccctccaaagctttccagactcttccagatcattctagatatttccagaaatcattcgtgaaatctaactaggagtagtctgtaaacaatgtgtttcacacagatacaattcataaacgatgagaagacaaggacacttcatgaatgaaatttttacggccgggtatgttggctcacgcctataatcccaggactttggaagacccaggcaggaggattgcttgagtccaggagttcaagaccagtctgggccacatagtgagaccctgtcgctacaaaaaatttaaaaattaggtagatatggtggtgtatgcctctagttttagcttttttggaggctgaagcaggaggatctcttgagcccaggaggttgagctgcaatgagctacgattgaactactacactccagtctgggtgacagagaaagaggctgcctcaaaaaaataaaaataaaaaaataaggccggacgcggtggctcacgcctgtaatcccagcactttgggaggctggggtgggcagaccacgaggtcaggagatcgaggccatcctggccaacatgatgaaaccctgtctctactgaaaacacaaaaattagctgggcgtggtggcgtatacctgtaatcccagctactcgggaggctgaggcaggagaatcacttgaaccagggagtcagaggttgcagcgagaggagattgtgccactgcattccagcctggcaacagagcaagactccgtctcaaaaaagaaacaacaacagcaacaacaacaaaaaaaacataaaaaagttcgggcacggtggctcacacctgtaatcccagcactttgggaggccaaggtgggtagatctcttgaggtcaggagttcaagaccagcctggccaacaaacatggtgaaaccccgtctctactaaaaatacaaaaagtagccgggtgtagtcccagctactcggaaggctgaggcaggagaatcgcttcaacctgggagatggaagttgcagtgaactgagattgcgccactgggtgacagagtaagactcttgtctcaaaaaaaaaaaaagaaagaaagtttaatttaatgattcaaataatgacctgctcgagagataaatataaagtctaacgtaagaggtgtatactttttcctctgtcctgctgtcctcgccccacctcaccccaagtcccaacctgattgatcagtctcctttccctctggtagccccactcccatgaccgaaccgagaagtcatgcacccgcataagaactctaattttttttttcaaagtcttctcactgccccaaaaatagtttctttcattcccaggggatgtgaaagtgtctctcccaattttatttcaacctcccagcgttccacacatatgccttgcctcagccagctttcactgatctgccatttccacctcggcgctgctcctacctgcggaaatcctgtccatccatagtctgatttctgttgttccagaacattcttttttttttcccctggaacattctttaagatacctcaataaatgaaaccagagggtatagagcagtatgaatgggtactacaatgtacagggggaaatggaggggaatatgatatactctcctccttgtatatgcttagaatgttctagaaggatatgcttaaaaggttagcagtcctggccaggcgtggtggctcacgcctgtaatctcagcactttgggatgccaacgcggacggatcacaaggtcaggagttctagatcagcctgaccaatatagtgaaacctcatctttactaaaaatacaaaaattagccgggtacggtggcatgtgcctgtagtcccagctactttggaacctgaggcaggagaatcgcttgaactcgggaggcagaggttgcagtgagccgagactgtgccattgcactgcagcctgggtgacagaacaggactccgtctcaaaaaaaaacaaaaaaggtcagcagtcttaattgtcagagggcaggggacctgcatgggatggaggtttttccatgtgtccaccttttgagcccttttgctttttttttttaaatctttttattgtagcaaaatagatataaaatttaccctttttttttttgagacagggtctcactctgttgcccaggttggagtgcagtggcatgatcttggctcactgcagcctctgcctcctgggttcaagcgattttcctgcctcagcctcccgagtagctgggattacaggtgcttgccaccatacccggctaattttgtatttttagtagagacggggttacgccaagttggccaagctggtcgcaaactcctgacctcaagtgatccgcccccctcggcctcccaaagtgctgggattacaggcaggagccaccacgctcagccctaaaatttaccatattaaccattttcaagttcagaggcattaaagtatactcacattgttgttcaactgtcaccactactcacctgcagaagtttttcatcttgcaaagtgaaaaccccatacccaatttcccgttcttcctctcagcccctggtaatcactattctactttttgtctactttttgtatgaatttgcctattctaggacctaatagaagtggagtcaaacctgtttgtccttttgtggctggcttatttcacccggccttatatcctcaaggtttatccatgttggaggatgcctgaatttccttgtttttaaggctaaattttattctattatattaatatgtcatattttgtttatcctgatggacacttgggttgattccacctttggccattttgaagaagcttctatgtacatggtatacacatatatctttgggtctctgctttcaatgcttttggggatatttcagatgtggaatttctggattataaggcaatttttttttttgagacagactctcgctcttgtcgcccaggctagaatgtggtggtgtgatctattttttttttttttttgagatggagtctcgctctgtcgcccaggctggagtgcagtgtcacgatctcagctcactgcaagctccgcctcccaggttcgtgccattcttatgcctcagcctcccaagtagctgggaccacagccgcccaccacctcacccggctaatttttgtatttttagtagagacagggtttcactatgttggccaggatggtctcgatctcctgacctcgtgatccgcctgcctcggcctcccaaagtgctgggattacaggcgtgagccactgcacccggctggtgtgatcttggctcgctgcaacctctgcctcccaggttcaagcgattcttgtgcctcagcctctccgcagctgggactacaggtgtgcgccactgtgcccagctactttttaaaaatatatgtgtatttattatacttttaagttctgggatacatgtacagaacgtgcaggtttgttacataggtatacatgtgccatggtggtttgctgcacccatcaaccggtcatctacattaggtatttctcctaatgctatcccttccctagccctccactctcccggttttttgttttgttttgttttgttgttttgtttttagtagagacagggtctcaccatgttgcccaggctagtcttgaactcctgacctcaagtgatccgcccacctcagcctcccaaagtgctgggattacaggtgtgacccactacactcggccttattttcacttatttatgcaattttcactattgctatattctaggaggcactgtggaattgcactgtggaattttagtattgctgtatttcagcaagccatgaggtctgtcagcacacggctttgggcattttgtgaagataactgatgccagctgagccaaggcaggttcctgattccacccactggcaggcaccgaggtctctgctgttactgatggtttctctgtggattgatgggcttaaggccagaccacagctgcaatggctcacctctgccaaaggccaggctcgttggggcagagacctattccggactgagcctcctggtgaattagagaggtagaaaatgggaggacgggggcaggtgggctattacagcgaggaaaatgcccaccctgagttgtattagataactttgggagttcaggaactttccaataaagtgggttccacagcaggattacttactgactccctaatagaaagaaggcaggcacaggccgggcgtgttggctcatgtctgtaatcccagcacgttgggaggctgaggcgggtggatcacaaggtcaggagatccagaccatcctggctaacaaagtgaaaccccgtctctactaaaaatacaaaaaattaggctgggcgtggtggctcgtgcctgtaatcccagcactttgggaggctgaggcgggcggatcacgaggtcaggagatcgagaccgtcctggctaacacggtaaaaccccatctctactaaacatacaaaaaaaaattagccaggtgtggtggcgggcgcctgtagtcccagctactcaggaggctgaggcaggagagtggtgtgaactcgggaggcgcagcttgcagtgagccgagactgcgccactgcactccagcctgggcaacagacagagactccgtctcaaaaaaaaaaaaaaaaaatacaaaaaattagccaggcgtggtggcacgtgcacgtgactgtagtcccagctacttgggaggctgaggcaggagaattgtttgaacccgggagacggaggttgcagtgagccgagatcgcgccactgcactccagcctgggtgacagagctagactccgtcaaaaaacaaaaaacaaaaaacaaaaaaacaaaaaaaaaaaaacagcaggaactggcaggtcttccctgaagagataaaaaaaaaaaaatgcagttgcaacacaaaagcagccacagagaaaagcaaacccatatatggtatttattatgcaccgagtgtggctctaatcacttttttttttttaattgagagacagcctggctctgttgattgggctggagtgcagtggcgcgaccgtagctcattgcagcctcaacctccttggctcaagcaatcctcctacctcagcctcctgagtagctgggaccacaggtgtgagccaccacgcctggctaattgttttttttttttttgtagagacagggtctcactatgtggcccaggctggtttccaactcctgggctcaagtgatcctcccacctctgcctcccaaagtgctggggattacaggcatgagccacctcgcctggcctctagtcgctttatatattttaacttaatccttacaagagccctgtgagctagttacaggagcacaaatggaaaccaagaaacagaaaaatttatcagcatgactcagtcctcagagccatgtatggccgtgtccgtgcatggcaggcaggtcaggggcctggggaacgctgttctggaaaccttggccaggccttggcacccgaggaatgtgcttttcagagtttttgtggctcttttccagacctgccctgacctctagctctgggaactatgtaagccaagtgccttccgggaagggagtccctctcctggtaactctttctgggtaaccagatgtggactcatgacacacactgagcctacgtcttataattttttgtttttgtttttgagacagtttcggtcttcttgcccaggctggagtgcaatggtgcgatctcggctcactgcaacctctgcctcccaggttcaagcgattctcctgcctcagcctccctagtagctggaattgcaggcatgcgccaccacgcctggctaattttttgtatttttttttttttagtagaaacggggtttcaccttgttagccaggctggtcaccaactcctgacctcaggtgatccgcccacctctgcctcccaaagtgctgggattacaggtgtgagacagctgtgagccaccacgcccggcgcattttttttttcttttttttcagagggagtgtccctctgtcacccaggctgaagtgtagtggcgtgatctcggcccactgtaacctctatctcccaggttcaagtgattctcctgactcagcctcccaagtagctgggactacaggcgcctgctaccatgcctggctaatttttgtagttttagtagaaaccgggttttgccatgttggccaggctggtctcaaactcttgacttcaggtgatccacctgccttggccttctgaagtgctgggattatagggcatgagccactgtgactggccatcttaaattttttttttttttttttttttttttgagacagggtttcactctgtcgcccaggctggagtgcaaaggcgcgatcttggttcactgcaagctccgcctcctgggttcatgccattctcctgcctctgcctcatgagtaactgagactacaggcgcccaccaccacgcccggctaatttttttgtatttttttagtagagatggggtttcaccttgttagccaggatggtctcgatctcctgacctcgtgatccacccgtctcggcctcccaaaatgctggcattacaggcgtgagccaccgcacccagccttaaatttttttttaagggaaatcaaacccagtgatattgggccagtacagtggctcacacctgtaattccaccactttgggaggctgaggcaggtgaatcacctgaggtcaggagttcgagaccagcccggcaaacatggcgaaaccccgtctctactaaaaataagaaaattagccgggcgtagtggcatgcacctgtaatctcagctactcgggaagctgaggcatgagaatcgcttgaacctgggagcaggatgttgcagtgaaccgatatcacaccactgcactccagcctgggtgacagagcaagactctgtctcaaaaaaaaaaagaaaaaaaaatccagtgatacttactttttaaatttttatttacttattttttgctttaagttgaatctttaaacttatctttatttttgagacacagtctcactctgtcgcccaggctggagtgcagtggtacaaccacagctcagtgcagcgttgacctcctgggctcaagccatcctcccgcctcagcctcccgagtagctgggactacaggcgcacacaaccatgtccagcttatttttgtattttttgtagagacagggtcccactgtgttgccctggcttgttctgaactcctaggctcaagtgatccccccgcctcaccctcccaaagtgctgggattacaggcatgagccaccacatccagacttcacttttttgtttaatgtcgcaaatggcataaggaatgggattcaatggggacacatttataaacgttgcagcagctcctagaacttgcctatccttgtaaacttctctaggtgattgctaattacttctttttttttttttttttttgagacggagtctcactctgtcgcccaggctggagtacagtggcgcaatctcgtctcactgcaaactccacctcccgggttcacgccattctcctgcctcagcctcccgagtagctgggactacaggcacccgccaccacgcccggctaattttttgtatttttttttagtagaggtggggtttcactgtgttatccaggatggtcttgatctcctgacctcgtgatccacctgcctcagcctcccaaagtgctgggattacaggcgtgagccaccatgcccagcccgctaattatttcaatttgaccttgacactgagcctgccaagtaggttcaagcattttgatggcccctttacaggttgggaaagctaatttatctgtccaaggccgaattctgaaactgagtcttaactgccaaaaattcttatcatcaatttcttcttctgggttgggcacagtggctcatgcctgtaaagccagcaatttgagaggcatcatgatgcaagaggaagaggattgagtgaagctaggagtttgggaccagcctgggcaacatagtgagaccccatctataaaaaaaaattaaaaattagttgggcatggtggtgcactcctgtggtcctagctattcaggaggctgaggtgggaggattccttgagcccagggttgacgctgcagagagctgtgatcacgccactgcagtccagcctgagtgacagctggaaataatgataaataaataataaataattatttaaaaaattataataaaaataattaaaaaattattttccctgattaatctttttttttgtccttctgagagttcaatttgtcccttttctgcctggtctcctaggtttccctaaaatcctgctgagaggttagcactgcctgccaaagtcagtttgcaaaatcccagagaaatccagcttattcctgggggaaccgccaagactgcccagccctgtgtggggttcaggcaagtttctcacatgtgcctttttggcaagaggcctctggcaaccccatgagtccccaaagagactcaattctaaaagttggtctccaccagctctctgtggcttaggggttcaagttcaactgtgaaagccctgttttgttttgattttgctttgagggagaggaaaccgcccttctgtttgttcaactccttctcctaaggggagaaatcaatatttacgtccagactccaggtatccgtacaattgatttttcagatgtttatactcagccaaaggcgggatcccacaaaacaaaaaatatttttttggctgtacttttgtgaagattttatttaaattcctgattgatcagtgtctattaggtgatttggaataacaatgtaaaaacaatatacaacgaaaggaagctaaaaatctatacacaattcctagaaaggaaaaggcaaatatagaaagtggcggaagttcccaacatttttagtgttttccttttgaggcagagaggacaatggcattaggctattggaggatcttgaaaggctgttgttatccttctgtggacaacaacagcaaaatgttaacagttaaacatcgagaaatttcaggaggatctttcagaagatgcgtttccaattttgagggggcgtcagctcttcaccggagacccaaatacaacaaatcaagtcgcctgccctggcgacactttcgaaggactggagtgggaatcagagcttcacgggttaaaaagccgatgtcacatcggccgttcgaaactcctcctcttgcagtgaggtgaagacatttgaaaatcaccccactgcaaactcctccccctgctagaaacctcacattgaaatgctgtaaatgacgtgggccccgagtgcaatcgcgggaagccagggtttccagctaggacacagcaggtcgtgatccgggtcgggacactgcctggcagaggctgcgagcatggggccctggggctggaaattgcgctggaccgtcgccttgctcctcgccgcggcggggactgcaggtaaggcttgctccaggcgccagaataggttgagagggagcccccggggggcccttgggaatttatttttttgggtacaaataatcactccatccctgggagacttgtggggtaatggcacggggtccttcccaaacggctggagggggcgctggaggggggcgctgaggggagcgcgagggtcgggaggagtctgagggatttaagggaaacggggcaccgctgtcccccaagtctccacagggtgagggaccgcatcttctttgagacggagtctagctctgtcgcccaggatggagtgcagtggcacgatctcagctcactgcaacctccgcctcccgggtttaagcgagtctcctctctcagcctcccgaatagctgggattacaggcgcccaaccaccacgcccgcctaatttttgtatttttagtagagacgggttttcaccattttggccaggctggtctcgaaccccgacctcaggtgatctgcccaaaagtgctgggattacaggcgtcagccaccgcgcccggccgggaccctctcttctaactcggagctgggtgtggggacctccagtcctaaaacaagggatcactcccacccccgccttaagtccttctgggggcgagggcgactggagacccggatgtccagcctggaggtcaccgcgggctcaggggtcccgatccgctttgcgcgaccccagggcgccactgccatcctgagttgggtgcagtcccgggattccgccgcgtgctccgggacgggggccaccccctcccgcccctgcccccgcccctttggcccgccccccgaattccattgggtgtagtccaacaggccaccctcgagccactccccttgtccaatgtgaggcggtggaggcggaggcgggcgtcgggaggacggggcttgtgtacgagcggggcggggctggcgcggaagtctgagcctcaccttgtccggggcgaggcggatgcaggggaggcctggcgttcctccgcggttcctgtcacaaaggcgacgacaagtcccgggtccccggagccgcctccgcgacatacacgagtcgccctccgttatcctgggccctcctggcgaagtccccggtttccgctgtgctctgtggcgacacctccgtccccaccttgtcctggggggcgccctcgccccaccagccccgatcaagttcacagaggggcccccggccaccctcaaggcctcggttccttacgaggttgaaacgttgcctcagaatctccccgcccctccttggtctgcagccgagatcttcagccacggtggggcagctatcccccgggaccgaccccctggggtggcctcgcttcttcagaggctgtgaatggcttcggttcagctgtccaagcggcgatttttcctctgggtgaaatggattagattttagatttccacaagaggctggttagtgcatgatcctgagttagagctttttaggtggctttaaattagttgcagagagacagcctcgccctagacaacagctacatggccctttccctcctgagaaccagcctagcctagaaaaggattgggattgcctgatgaacacaaggattgcaggaaactttttttttaattggcaagggggttggctttgactggatggagagctttgaactgccttgaaattcacgctgtaactaacacaccagtttcctctgggaggccagagagggagggagggtgtaatgaaatacggatgattgttcttttatttttatttacttatttattttttaactttttgtagagatgaggtctcgcttggttgctcaggctggtcttgaactcctggcctcaagcgatcctcctacctcagcctcccaaagtgttgggattacaggagtgagccaccgcgccccaccggggatgatgatgattgcaaacattctgccactcagttttacaaaagaaagagaggcactggattaatgtgtatctcactcaccaatcaacctcttccttaagagaaaatgttaaggaagtcttaggcaaggccttgtttgttcatcactttagtttctctctcccgggatggctgagaatgtgatgtttcctctgttgtcaaggagactacacccctgatgttttcctccagacttctgagagctggtgtgtgtttctagcactttctagctgcaccacctcacgctgtagctggcttcaaggcatatccaggggggagtttcttgtccatttcctttacaaagggaagttgttggaatctgaaccgcaagccttcacttagaccaaaatcaggcaacagcggtgagcgcagctccaaacgtgtcaatgactcacccaaatttgagtaagggagttggctgctttaacgagccgcagggtgattcccttgtcatttccggaaatacctatcttccagggaacactgggaaaaaacagggagacctttgttgagacagaaaacctgtaggggaattctgttcctcattcctgctcttatctgtagacttcctccctgataagatccaattctagatgggtcggttgctccttgctttgatgggtgctttgatgggctttattattattattattattattattattattttgatgggctttttgatgtcccttttccttccacactctgtcccaactgtcaagcaaatagccttttgttgctaagagactgcagatgtaaccgaccagcagcaaacagtgagtcaggctctctcttccggaagcaaaatcaattgctgagatcactctggggaaaatacccaccttatttggaaagaagcactgatcaattgatgtctattttttttttttttgagttggagtctcgccctgtcacccaggctggagtgcaatggcataatctcgcctcactgcaatccccgcctcccgggttccagcaattctcctgcctcagcctcctgagtagctggaattataggcgcctgccacaacacccggctaatttttgtatttgtagtagagatggggtttcaccacgttggccaggctggtctcgaactcctgacctcgtgatccacccgcctcagcctcccaaagtccaaggattgcaggcgtgacccactgtgccagccaatcaattgatttctcattcattttcagctggctctgttcccttaagccaggggattttcgtttgtttgtttccccttcaaggaaatgattctagctacagttttgatttccttgtacaactgttttcagtagcacagggaaagaaaacatcgaaagcattcaccacctcatttgtgtgctgggggaaaaagcagaaatgtgtattctctttttttgtttcgatgaccttgttcctgacttgttactcgtgacttgagagatcagagggctagaggactagaatttatagaggtgttttttttgtttgtttatttttgttcgagttgcccaggctggagtgcagtggcgcaatctcggctcactgcaacctctgcctcccaggttcaagcgattcttcggcctcagcctcctgagtagctggaactacaggcgcccgccaccacacccagctaatttttgtatttttcagtagagatgggatttcaccatattggtcaagctggcctcgaactcctgacctcgtgatccacccgcctcagtttcccaaagtgctgggagtacaggcgtgagccgccgtgcccggcctttttgtgtttttgtgtttttgagaggagctcattgctttttaggcttccctagcgtgagaaaatctggggatccatgctctagtttacttcctttttttttttttttttgagatggagtctcgcttagattgcctaatctcagctcattgcaacttctgcctccggggttcaagggattctcgtgtctcagcctcctgggtagctaggatacgggcacccgctaccatgcctggctaattttgtacttttagtagagacagggtttcgccacgttggccaggctggtctcgaactcctgacctcaggtgagccgcctgccttggcctcccaaagtgctgagattacaggcgtgagccaccgcgcttggcctaatttgcttttcctgaaattcaaatggtctaatatgaaaaacgccaaccttgcttgaaagaataagaaagaggtgcggtttcgttgggccgttgatgtttggaacaggactggttttgtccccttgctcggaaagggcagcaactgtgaggacagctccctgacgtgctctcactcagcactgttccgttcctgagcactgtccccactagctaggccaagggagctcatttggcaggcaactgctgtctggctgcgcctgtggcagtaaaatctgcctttattttttggaggcagggtcttgccctgtcgctcaggctgaagtgtgcagttatagctcactgcagcctccagcttctgtactcaactgatcctcctctctcagcctcctgagtagctgggactatacgcacgtgttaccactcccacctcagtttgtttgtttatttatttatttatttatttattgagatggagttttgctcttgctgcccaggctggagtgcaatggcgcgatctcggctcaccgcaacctccacctcctggttcaagcgattctcctgcctcagcctcctgagtagctgggattacaggcatgcaccaccacgcccggctaattttgtatttttcgtagagatggggtttctccacattggttcaggctgttctcgaactcccaacctcaggtgatccacccgcctcagcctcccaaagtgctgggattataggcgtgagcccccgaacccggccactcccagctaagtttaaattttttgtttgtttgttcgtttgtttttattttttgagacagagtctcccgcccaggctggagcgcagatcactgcatccttgacctcccaggcttaagccatcctccccactcagcctcccaagtagctgggattacaggtgtgtgccactatgcttggctaagttgtgtattttttgtagagatggggttcaagggattctcgctttgttgcctcggttggtctcaaactcctgggctcaagcagtcctccctcctcagcctcccaaggtgctggggaaatccacttttgaaacattgtctggagagttgcccaggtggtagatcacagaaataggtcatcgtggggtccttcccatgggtgcagtcttgagccacctgtggccagcaaatatttggagaataatagtcaggggagagcttgaggtccagggaaaggttttgtttttcttcagggaaaggtttttattgttctttatccctccttaaaggaccttcaggtgttactgacattcccggtctacccagtggcacatttagtttgtaagctgggccctcgtacagaggtagggaggtgagagcattggattagtggtcaccaaagctgcggtcacctagtggggtgatcagaggctcctcccttaagatcttgattgccaacgcctctggcccaactttcctttttatttatcgcaagcctcctggaatctcaattgctttttgcccacccggtgtgtcagcacaagaaatgagtcatttcctcctttaagcacagttgaaattgagctgtgagtcagtgaggtgtgtacgatattgtcaaagcggggtgtgtacagtattgacagatctgtagttgggcaagagaattatcagagtttgtgaccacagcagattccaaagctcgactcattttcttctctcttccttcccttttttcttttctttttttttttttttttgacagagtctcgctctgttgcccaggctggagtgcagtggcacaatctgggctcactgcagcccctgcctcctgggttcaaatgattctcatgtttcagcctcccgagtagctgcaattacaggcattcgggttcaagtgattctcctgcctcagccacctgagcagctgggattacaggcgcccgccaccacgcccggctaatttttgtatttttagtagagacggggtttcaccatgttggccaggctggtctcgaactcctgaactcaggtgatccgcccacttcggcctcccaaagtgctgagattacagacgtgagtcaccgcgcccagcctgttctgttctttaattctcaaaacaccctctaggaagtagagactgccattctcccccattttacagatcaggaaactgagtcccagaaggatttagtcagttacccaagttgttctagttaaatggcctggaaagccagtgaagcccaggattgtctatctaacccccttactactctaactttcagggaatccacatgaatgtgctgggtcaaccatcaaagttgaaatggataaagggggctggatgcggtggctgatgcctgtaatcctagcactttgggaggccgagatgggtgggtggattgcttgagcccaagagtttgagaccagcctgggcaacatagtgagacacctgtctctgcaaaaaataaataaaaagttagctgagtgtgatggtgcacccctctagtcacagctgttgagttaggcttaggcaggaggatcgcatgaacctgggaggtggaggcggccgtgagcctcagtcatgccactgcactccaacctgggcaacagagtgaaagccggtgtccgaaagagaaagaaaaaaagacatagatacatcttttaaagttaggttgtatgttaattacctacaactcagtttcaactgtgcttaaaggaggaaatgactcatttcttgctacatatcaaattagcccaaaatgtagtggcttaaaacaacacatttatgatttctcagtttttgcgtgtcaggaatttggaagcagcacagctagacggttccagctcagggtctctcatgaagttgcaatcaaaatattggcaggagagaaaaacatattttcagaagctgcaggcataggaagacttggctggggttgaaggatccacttccaagatggcgcactcagtggctcttggctggaggcctcagttccctgctgcgtggagctctccctccagctgcttgagtggactcatgacatgcagctggcctcccctggagcagtcgatccaacaatgagcatggccatgaactaggctcagaagccactccctgtcgtctctacattttcctatcagaagcaagtcattaaaagtccagtgccactccaggggagacgaattaggctctgccttctgaaaggattatcacagaagatgcggtcctatattctttttttaaaattattcttttttttattttgtagagatggggtcttggtatgttgcctaggccagtctggaattcctgggctcaaacaatcctgtctctgcctcccaaagtgttgggattacaggcatgagccactgcacctggtcatgtggtcatattttctttttcttttttttttttttttgagacagagtctctgtcgcccaggctggagtatggtggcgtgatctcagttcactgcagcctccgcctcccgggttcaagcgattctcctgcctcagcctcctgagtagctgggattacaggcgcccgccaacatgcccagctaatttttttagtagagatggggtttcaccatgttagccaggatggtctcgatctcctgatttggtgatccgcccaccttggcctcccaaagtttcaaccatcgatcagaacttattgatgtacttatgtagctaggcacggtggcgcgtgcctgtaatcccagctacttggaagggttaaggcaggagaatcgcttgaacctgggaggcagaggttacagtgagtcaagatcataccattgcactccagtctgggcaacagaatgagactctgtctcaaaaacaaaaaacaaacccttgtatgtgattttcctggatagcatctgttacatcttcacaaagataaaaagtcagacttggctgggcatggtggctcacacctgtaatcccagcactgagaggctgaggcaggcagatcacttgaggtcaggaatttgagaccaggctgggcagcatggtgaaaccccgtctctacaaaaaatacaaaaattagccgggtgtggtgtcacgcacctgtattcccaagctactcaggaagctaaggcaggagaatcacttgaacccagaggtggaggtttgcagtgagttgagattgtgccattgcactccagcctgggcgacagagtgagactctgtgtcaaaaataaaataaaataaaattttaaaaaaggcagatttttttttcttcttggtattgttaccttattatagtaataataagtgcatagtgcatgctgagataagcaatcataatttgttattgcggccgggcatggtggctccagcctataatcccagcactttggtcaggagttcaaggccagcctggccaatatagtgaaactccatctctactaaaatacaagaaattacctgggcatggtggcagttgctggtgatccccagctacttgggaggctgaggcaggagaatcgcttgaacctgggaagcagaggttgcagtgagccaagattgcaccactgcactccagcctgggtgacagagtgagactctgtctgaaaataataataataataatttgttattgcttttattgccttagtttacatagggaatcaaagtttatactttgatttataaaagttgctttgattctagttcacagaaccagaatctttcatataaaggtattagagggcccagtgtggtggctcatgcctgtaatcccagcatattgggaggctgaggagggaggatcactttaggagtttgaggccagcctaggcaacatagtgagaccttgtctctacaaaaaattccaacattagctgggcatggtggcatgtgcctgtagtcccatttatttggggggctgaggcaggaggatcacttgagcccacgaggttcaatccaggttgcagtaagccatgatcctgccactgcactccagtttgggtaacagagcgaagctatgtctcaaaaaaagaaaaaaaaagtattctaaatccaaatttaatatataaaactaaatgcaggccaagtgtggtggcatatacctataatcacaacactttgggaggctgaggtgggaggattgcttgagcccaagagttcaagaccagcctaggtaacacagtaagaccccatctctacaaaaagtagaaaaattagcctggcatggtggtgagtgcttttaatcccaactacttagggggctgagatgggaagattgcttgagcctcagagtttgaggctgcagtgggccgtgatcgctccactgatcgctctaaagtgagaccctgtctcaaaaaaaaagaaaatagaagaaaactaaatacattcaataagactttgatctcttttccaaggtgtaaatatattttgggaaattttccagttactttgttctcattttaatgtaataatctaagtcttggttttctaaggaaaagttttctcttattatatcttttgttaatgtttctctcccatttcttttgatctgatcttcagatacatgattatcttcactgctaaatttgtgttctctggcctctacatttataatttctcataattctttatctaagtatttcttccctacctactgaagaaaactcaagttttcttccaccttaatgattatgctgtgtctgtgagttttcttcatgactctttacagtacaagttttttgtttttgtttttttaatggtcagatggatagaacaacacaggttttgtttgttttgttttaacttttaaaaaaattataatagataaagggtctcactacgttgtccaggctgatctcatactcctgggctcaagcaatccacccacctctgcctcccaaagtgctgggattacagtcatgagccaacatgcctgggcagtacaggttttttttgagacggagttttgttcttgttgccgaggctggagtgcaatggcacaatcttggctcaccacaaagtctgcctcccaggttcaagtgattctcctgcctcagcctcctgagtagctgggattacaggcatgtgccaccacgcccagctaattttgtatttttagtagagacggggtttcaccatgttggccaggctggtttcgaactgctgacctcaggtgatctgcccacctcggcctcccaaagtgctgggattacaggcatgagccaccatgcccagctgtagtacaggttttaatatgctaaatactcttcctttctttattaatgtgcatggaagttctaatatttttttcccataccccagagagtccatattttggaatcaacaacactagcctttgttgacaagtgtctctcttgggttccttctttgtgtcctccactgaattttggggttcataaaatttcatttgttgtgcttgcttaattccctgggaatcagactgttcctgatcggatgacatttctggttaattctttagttggcaggaaatagacacaggaaacgtggtcagtttctgattctggcgttgagagaccctttctccttttcctctctctcagtgggcgacagatgcgaaagaaacgagttccagtgccaagacgggaaatgcatctcctacaagtgggtctgcgatggcagcgctgagtgccaggatggctctgatgagtcccaggagacgtgctgtgagtcccctttgggcatgatatgcatttatttttgtaatagagacagggtctcgccatgttggccaggctggtcttgaatttctggtctcaagtgatccgctggcctcggcctcccaaagtgctgggattacaggcaccacgcctggcctgtgacacgattcttaacccctttttgatgatggcggctggaaaagtggccagtggattttgatgtattcaatcatgaattaggaggtggggagagaatgaattattggagctttccttaaagccattaaatggctctattgttttttcaattgatgtgaatttcacataacatgaaattaaccagctcagtggcattaatacatctgcaatgctgtgtggccaccacctctatcttgttccaaaactttgcataacctaatgtctttttttttttttttttttgagacggagtctcgttccatcacccaggctggagtgcagtggtgtgatctcagctcactgcaacctccgcctcccaggttcacgccatcctcctgcctcagcctcccgagtagctgggactacaggcaccctccaccacatccggctaattttttgtatctttagtagagatggggtttcaccatgttagccgggatggtctcgatctcctgacctcgtgatccacctgcctccgcctcccaaagtgctggcattacaggcgtgagccaccatgcccggcctatttttttttttaagagatggagtctaattctgttgcccaggctggagtccagtggtaccatcatacttcactgcagccttgacctcttgggctcaagtgattctcttgcctcgaactcccaaagtattgggattacaggtgtgagccaccgcactcagcctaatgtccagtttttaacaagctccatttaaatgccctccgttttgacccataaaggggtaggcttggccgggcacaatggcttgtgtctgtagtcccagctacttgggaggctgaggcagaaaggcagaaagattgctttataaagcccaggagtttgagggccacctgggtggcatagctagacctcatctctaaaaaataagtaataaataaatatttgtttttgtttttttctttttcttttcttttttttttttttttgagacggagtcttgctctgttgcccaggctggagtgcagtggcgcgatctcagctcactgcaagctgtgcctcctgggttcatgccattctcctgcctcagcctcccgagtagctgggactacaggcgcccactaccacgcccagctaattttttgtatttttagtagagatggggtttcaccacgttagccaggatggtctcaatctcctgacctcgtgatccgccagctttggcctcccaaagtgttgggattacaggcgtgagccactgagcccgccccatatgtatgtatatatatatttttttaaaatgggagaccaggcatggtggctcatgcctagaatcccagcactttgggaagctgaggtaggcggatcacttgaggccatgagtttgagaccagcctgctcaacatgatgaaacttctatctctactaaaaaaaaaagtgggattaggtcaggcacggtggctcacacctgtaatcccagcactttcagaggccgaggcaggaggatcatgaggtcaggagatcgagaccatcctggctaacacggtgaaaccccgtctctactaaaaaaatacaaaaaattagccaggcgtggtggcgggtgcctgtagtcccagctactcaggaggctgaggcaggagaatggcgtgaacccgggaggcggagcttgcagtgagccaagatcgtgccactgtactccagcctgggcgacagagcaagactctgtctcaaaaaaaaaaaaaaaagtgggattgacattctcttcaaagttctggggttttcctttgcaaagacaggattggcaaggccagtgggtcttttttgtgtgtgtgtgtgtgacggagtctcactctgccacccaggctggagtgcaatggcaggatctcggctcaccgcaacctcctcctcccaggttaaagtgattctcctgcctcagcctcccgagtagctgggactacaggtgcccgccaccacacccaactaatttttgtatttttagtagagacagggtttcactatattggccaggctggtcttgaacccctgacctcacgtgatccacccgccttggcctcccaaagtgctgggattacaggcgtgagccactgtgctcggcctcagtgggtctttcctttgagtgacagttcaatcctgtctcttctgtagtgtctgtcacctgcaaatccggggacttcagctgtgggggccgtgtcaaccgctgcattcctcagttctggaggtgcgatggccaagtggactgcgacaacggctcagacgagcaaggctgtcgtaagtgtggccctgcctttgctattgagcctatctgagtcctggggagtggtctgactttgtctctacggggtcctgctcgagctgcaaggcagctgccccgaactgggctccatctcttgggggctcataccaagcctcttccgcccttcaaatccccccttgaccaggaggcattacaaagtggggatggtgctacctcttcgggtttgtcacgcacagtcagggaggctgtccctgccgagggctagccacctggcacacacactggcaagccgctgtgattcccgctggtcgtgatccccgtgatcctgtgatccccgccccgtgaggctgaacacatagtgacgcttgctagccaagcctcaatgacccacgtaacatgaagggggaaaagccagaaagttctgccaaggagcaaggccaagaatcccgaagggaaatggactttgaagctgggcgtcttcttggctgtcttaatacaagtggcacatccaaatccaaaaccccgaaattcaaagtcttgagcacccgaaattctgaaacgtcttgagcactgacctttagaaggaaatgcttattggagcattttggatttcggatttttaccactgagtgtggagtcctaattaggaaaaaaaccaggctgaccgaaccaaaggaaagcaataaaagaaggcagatagggtcaggcacggtggctcacccctgtaatcccagccttttgagaggctgaggcgggtggatcacttgaggtcaggagttcgagagcagcctggccaacacggtgaaaccccatctctactgaaaatacaaaaactagccaggtatggtggcgtctgcctgtaatcccagctactcgggaggctgagacaggagaatcacttgaacctgggaggcagaggttgcagtgagccaatatcacgccattgcactccagcctgggggacaagagcgaaattctgtctcaaaaaaaaagaagaagaaggccgacaaactatgtaactctgcctttctccatggtccagaacacacagccctcctgcgtaaataactccttatcttcctgctcccagctatcatcagacacctcggctgatagaaaattgcaagttagctcactgcaacctcggcattataagtactgcacaaagccctcttcagcgcacagcacaagcaccattctataaaatctccagcaagcggccaggtgcagtggctcatacctgtaatcccagcattttgggagactgaggcgggcggatcacctgaggtcaggagtttgagaccagcctggccaacatggtgaaaccccgtctctattaaaaatacaaaaaaattagccaggcgtggtggcaggtgcctgtaatcccagctacttggaaggctgaggcaggagaatcgcttgaacccgggaggtggaagttgcagtgagccgagatcttgccatcgcactccagcctgggggacaagagtgagacttcgtctcaaaaaaaaaaaaaaaaattcccagcaagcctttgtcttctggcagtcagctcctctcttgctgacctgctcattgctttcttgcaaggtattttcctacctactttctggaataaatctgtctttctgtacttacaactaccttttttaaaatttctttcttttttgagatggagtctcactctgtttgcccaggctggagttcagtggtgcaatctcagctcactgcaacctctacctactgggttcaagcgattctcctgcctcagcttcccgagtagctgggattacaggcgtgcaccagcacgcaggctaatttttgtatttttagtagagacggggtttcaccatgttggccaaggtggtcttgaactcctgacctcaagtgatcctcccacctcagcctcccaaagcgctaggattacggccatgagccactgaggccggctgcacctacaactgtcttgataaattcttacccccacaccactggtccagatagtcagtgctcacccacaacattaaggatattccaaatttgaaacattccaaaatcagaaaaatattccaactctgaaaatattccaaaatccaaaaaaattcaaaatccaaaacacttctggtcccaagcattttagagaagggatactcaacccaaaataaggacagcaattctataaattgtgctaccatcttgcaggtctcagtttaacagctttacacctattagcgcaccagtgctcatagcagtgctgggaaatgtgtacagatgaggaaactgaggcaccgagagggcagtggttcagagtccatggcccctgactgctccccagcccgcctttccaggggcctggcctcactgcggcagcgtccccggctatagaatgggctggtgttgggagacttcacacggtgatggtggtctcggcccatccatccctgcagcccccaagacgtgctcccaggacgagtttcgctgccacgatgggaagtgcatctctcggcagttcgtctgtgactcagaccgggactgcttggacggctcagacgaggcctcctgcccggtgctcacctgtggtcccgccagcttccagtgcaacagctccacctgcatcccccagctgtgggcctgcgacaacgaccccgactgcgaagatggctcggatgagtggccgcagcgctgtaggggtctttacgtgttccaaggggacagtagcccctgctcggccttcgagttccactgcctaagtggcgagtgcatccactccagctggcgctgtgatggtggccccgactgcaaggacaaatctgacgaggaaaactgcggtatgggcggggccagggtgggggcggggcgtcctatcacctgtccctgggctcccccaggtgtgggacatgcagtgatttaggtgccgaagtggatttccaacaacatgccaagaaagtattcccatttcatgtttgtttcttttttttcttttctttctttattttgtttttgagatggagtctcactctgtgatttttttcatctctaaatttcctacatccatatggccaccatgaggccccaggctggccgatggttgctgttagcttattgggaaatcactgtttggaaggtgctggttgttttttgttgtttgttgtttttgtttttgtttttgttttgagacggagtctcgctctgtcgccagggtggagtgcagtggcgcgatcagctcactgcaacctccgcttcctgggttcaagccattctcctgcctcagcctcccaagtagcgcggattacaggcatgtgccaccacctccggctatttttttttctatttagtagagatggggtttcaccatgttagtcaggctggtcatgaactcttgacctcaggtgatccacccgcctcggcctcccaaagtgctgggattacaggcgtgcactgctgcacccagcctttttttgtttttttgagacagggtcttgctgtcacccaggttgaagtaaggtggcacgattatggctcactgcggccttgatctccttggctcaagcgatcctctcacttcagcctctcaagcagttggaaccacaggctgtaccaccaagcctggccaatttttttgtacagacacaggctggtcttgaactcctgggctcaagcaatcctcctgccttggcctcccaaagtgctgggattccaggcatgagccgctgcacccggcaaaaggccctgcttctttttctctggttgtctcttcttgagaaaatcaacacactctgtcctgttttccagctgtggccacctgtcgccctgacgaattccagtgctctgatggaaactgcatccatggcagccggcagtgtgaccgggaatatgactgcaaggacatgagcgatgaagttggctgcgttaatggtgagcgctggccatctggttttccatcccccattctctgtgccttgctgcttgcaaatgatttgtgaagccagagggcgcttccctggtcagctctgcaccagctgtgcgtctgtgggcaagtgacttgacttctcagagcctcacttccttttgttttgagacggagtctcgctctgacacccaggctggagtgctgtggcacaatcacagctcacggcagcctctgcctctgatgtccagtgattctcctgcctcagcctcccgagtagctgagattaaaggcgtataccaccacgcccggctaattttttgtatttttattagagacagggtttctccatgttggccaggctggtcttgaactcctggtctcaggtgatccacccgcctcggcctcccaaagtgctaggattacaggtgtgagccactgcgccaggcctaatttttttgtatttttagtagagatgcggttttgccatattgcccaggctggtctcgaactcctgggctcaagcgatctgcctgccttggcctcccaaagtgctgggattacaggcacaaaccaccgtgcccgacgcgttttcttaatgaatccatttgcatgcgttcttatgtgaataaactattatatgaatgagtgccaagcaaactgaggctcagacacacctgaccttcctccttcctctctctggctctcacagtgacactctgcgagggacccaacaagttcaagtgtcacagcggcgaatgcatcaccctggacaaagtctgcaacatggctagagactgccgggactggtcagatgaacccatcaaagagtgcggtgagtctcggtgcaggcggcttgcagagtttgtggggagccaggaaagggactgagacatgagtgctgtagggttttgggaactccactctgcccaccctgtgcaaagggctccttttttcattttgagacagtctcgcacggtcgcccaggctggagcgcaatggcgcgatctcggctcactgcaacctctgcctcccaggttcaagtgattctcctgcctcagcctcctgagtagctgggattacaggcgcccaccaccaagcccgggtaattttttgtatgtttagtagagatggggtttcactatgttggccaggctggtgttgaactcctgacctcatgatccgcccacctcggcctcccaaagtgctgggattacaggcgtgacccaccccatgaaaaaaaattaaaaaatgaagcgatgctgggcgcggtggatcacgcctgtaatcccagcactttgggaagctgaggcaggcagatcacgagggcaggagattgagaccatcctggctaatacggtgaaaccccatctctactaaaactacaaaaaattagccgggtgtggtggcaggcacctgtgatcccagctactcaggaggctgaggcaggagaatcgcttgaacccaggaggtggaggttgcagtgagccgggatcacaccattgcactccagcctgggtgacagagtgagactctgtctcaaaaaaaaaaaaaaaaaaaaaagcgaattctgaaatacatgaattcttttccttagatgcctgcttctgtcttgaggtttgttgttgttatttcgaaacagagtcttgctctgtcgctcaggctggagtgcagtggcatgatcttggctcaccacaacctccggctcccaggttcaagcgattcttctgcctcagcctcctgagtagctgggattacagctgaatgccaccttgctgggctaatttttgtatttttagtagagatggggtttcaccatgttggccaggctggcctcgaactcctgacctcgagtgatctgcccgcctcctgaagtgctgggattacaggcgtgagccacctcgtcctggtgagggtttttttttttccccaaccctctgtggtggatactgaaagaccatattaggataactgtacagtatagagaaggcagtggcaagttttctctgtcatataccagagtgggcttgggcatggtggcatactcctgtagtctcagctaatcaggaggctgaggaaggaggatcgcttgggcccaggagttggagactgtagtgagctgtgatcacaccaccacacttcaatctgggcaacagagcaagagaccctatctctaaaaaaaagtaagtatttcggacactgtgggccatacggtctctggtgcagtttctcaacatggctgttgggtgaacacaaccacgcacagaacgcaaaccaatacacgtggctgtgggcccagaaaatgttatttatggacacaaaaattggaatttcatataactgttttgtgtcatgaaaatgatttccctttttatttttatttttcttctcaagtatttaaatatgtaaaagccatttttaggcctggcaggatggttcacagctgtaatcccagcactttgggaggtcgaggcgggaggatcacgaggtcaggagatcgagaccatcctggccaacacagtgaaaccccgtctctactaaaaatacaaaaaattaaccaggcttggtggcgcgcgtctgtagtcccagctgctcaggaggctgaggcaggagaatcgcttgaatgcaggaggcggaggttgtagtgagccgaggttgcaccactgcactccagcctgagcgacagagtgagagtccgcctcaaacaaaaaaatgtttgcccatgctggtcttgaactcctgggctcaagctatctgcctgccttggtctcccaaagttctgggattacaggcatgagctacagcgcccggacttttgttgttttatatctatatatctatatataacttgttttatgtatatatataacttgttttatatatatacataaactgcagtaaaaaacatgtaacataaaatttaccttctcaaaccttattaagtgcacagttctgtgccattagcaaattcacactgttgtacaacatcacaaccaccatctccagaacttttttttttttttttattctttttgagacagagtctcactcgtcgcacgggctggagtgcagtggtgcgatctcggttcactgcaacctccacctaccaggttcaagcaattctcctgcctcagccccctcagtagctgggattacaggtgcccgtcctaccacgcccagctaatttttgtattttcagtagagactgactgggtttcaccatgttggccaggctggtctcgaactcctgacctcaagtgatcctcccacctcagcctcccaaagtgctgggaatacaggcatgagccactgcgcccggccccagaactcttttatcttcccaaactgaagctctgtccccatgaaacactcactctccatcccctccccaactcctggcacccaccattctactttctgtccctatgaatgtgatggctctagggacctcctctgagtggaatcagacagcattttccttttttgactggcttatttcactgagccaagtgcggtggcacacgcctgtaatcccaaaactttgggagaccgaggcgggcgcatcacctgaggtcaggagttcgagaccagcccggccaacatggtgaaaccccatctctagtaaaaatacaaaaaattagcctgtcatggtcgtgggtgcctgtaatcccagctaagtgggaggctgaggcaggagaatcgcttgtacccaggaggcggaggtcgcagtgagccgagatcgtgccattacactccagcctgggcaacaagagtgaaactccgtctctcctaaaaatacaaaaaaattagctgggcatggtggcacatgcctgtagtcccagctacttgggaggctgaggcaggagaatcacttgaacccgggaggtggaggttgtaatgagccaaggttggcggcgaagggatgggtaggggcccgagagtgaccagtctgcatcccctggccctgcgcagggaccaacgaatgcttggacaacaacggcggctgttcccacgtctgcaatgaccttaagatcggctacgagtgcctgtgccccgacggcttccagctggtggcccagcgaagatgcgaaggtgattcccgggtgggactgagccctgggccccctctgcgcttcctgacatggcaaccaaacccctcatgcctcagtttccccatctgttaagtgtgcttgaaagcagttaggagggtttcatgagattccacctgcatggaaaactatcattggctggccagagtttcttgcctctggggattagtaattaagaaatttcaggccgggtgcgtaatccctgtaatcccaacaccttgggacgccgaggcgggcagatcacctgaggtcgggagttccagaccagcctgaccaacatggagaaaccccgtctctactaaaaatacaaaattagccgggcttggtggtgcatgcctataatcccagctactcaggaggctgaggcaggagaatcacttgaacctgggaggtggaggttgtggtgagccaagatcgtgccattgcactccagcctgggcaacaagagtgaaactccatccaaaaaaaaaagaaaagaaaagaaaaaaaagaaaagaaatttcagctgacacagcttcacactcttggttgggttcccgtggtgaatgatgaggtcaggtgatgactggggatgacacctggctgtttccttgattacatctcccgagaggctgggctgtctcctggctgccttcgaaggtgtgggttttggcctgggccccatcgctccgtctctagccattggggaagagcctccccaccaagcctctttctctctcttccagatatcgatgagtgtcaggatcccgacacctgcagccagctctgcgtgaacctggagggtggctacaagtgccagtgtgaggaaggcttccagctggacccccacacgaaggcctgcaaggctgtgggtgagcacgggaaggcggcgggtgggggcggcctcaccccttgcaggcagcagtggtgggggagtttcatcctctgaactttgcacagactcatatcccctgaccgggaggctgtttgctcctgagggctctggcaggggagtctgccgccctgttaggacttgggcttgccagggggatgcctgcatatgtcctagtttttgggaatatccagttaacggaaccctcagccctactggtggaacaggaaccggctttcctttcagggacaacctggggagtgacttcaaggggttaaagaaaaaaaattagctgggcatggtgccacacacctgtggtcccagctactcagaaggctgaggcgggaggattgcttgagggcaggaggattggttgatcctcccacctcagcctccggagtagctgggacctcaggtgcatgccactatgcctggctaattttcttttttctttttttttttttttcgagacggagtctcgctctgttgcccaggctggagtgcagtggcaggatctcggctcactgcaagctccgcctcccgggttcacgccattctcctgcctcagcctccccagtagctgggactacaggagcccgccactgcaccaggccaatttttttgtatttttagtagagacggggtttcactgtgttagccaggatggtctcgatctcctgacttcgtgatccgcccacctcggccttccaaagtgctcggattacaggcgtgagccactgcgcccagccgctaattttcatatttttagtaaaaacagggtttcaccatgttggccaggctagtcttgaactcctgaacccaagtgatcctcctgccttggcctcccaaagtgctgggattacagacaccacacctggctattattattttttagagacagggtgctgctctatcttccagcctgtagtgcagtgcagcctccatcatagctcgctgcagccttgacctcctgggttcacgtgatcgtcccgcctaagcctctggaggagctgggagtactggcatgtgccaccatgcctggttaatttttttttttttttttttgagacagagtctcattctgtcacccaggctggagtgcggtggtgcgatcttggcttactgaaacctccacctcccaggttccagcaattctcctgcctcacccttctgagtagctgggattacaggttccggctaccaaacctggctagtttttgtatgtttagtagagacagggtttcaccatgttggtgaggctggtctcgattctcccgcctcagcctcccaaagtgctgggattacaggcttgagccaccgtgcctggcttttttttttttttttttttttgtggcaataaggtctcattgtcttgcccaggctagccttatgctcctagcctcaagtgatcctcctccctcagcctcccaaagtgctgggattacaggtgggcgccactgtgcctgttcccgttgggaggtcttttccaccctctttttctgggtgcctcctctggctcagccgcaccctgcaggatgacacaaggggatggggaggcactcttggttccatcgacgggtcccctctgaccccctgacctcgctccccggacccccaggctccatcgcctacctcttcttcaccaaccggcacgaggtcaggaagatgacgctggaccggagcgagtacaccagcctcatccccaacctgaggaacgtggtcgctctggacacggaggtggccagcaatagaatctactggtctgacctgtcccagagaatgatctgcaggtgagcgtcgcccctgcctgcagccttggcccgcaggtgagatgagggctcctggcgctgatgcccttctctcctcctgcctcagcacccagcttgacagagcccacggcgtctcttcctatgacaccgtcatcagcagagacatccaggcccccgacgggctggctgtggactggatccacagcaacatctactggaccgactctgtcctgggcactgtctctgttgcggataccaagggcgtgaagaggaaaacgttattcagggagaacggctccaagccaagggccatcgtggtggatcctgttcatgggtgcgtatccacgacgctgagggctgcagagggaatggagggagcaggaaggagcttcaggaactggttagtgggctgggcatggtggctcaaagcacctgtaatcccagcactttgggaggccaaggtgggtggatcatcaagaccagcctgaccaacatggtgaaacctcgtctctactaaaaatacaaaaattagccgggtgtggtggtgggcacctgtaatcccagctgctcgggaggctgaggcaggagaatcacttgaacctgggagatggaggttgcagtgagccaagacagccccactgcactccagcctgggtgacagagtgagactccgtctcaaaaaaaaaaaaaaaaactaaacaaaaaactggttagtggctagacaacaggatggtatcttccaagcccatggctgactcagcagctcctgggtcaagacactgtgacctgtgtcccctggcaggaagcatcgcccctgccacctgcccggtgtactctgtacctgtcaggtgacatctgctacctaagcacgtgagaggtggcatttcacagtttcagtgtggtgctgacaacccgggacgcacactgtccttgcagctacaatcaggaggtgaatgttgggtttccagcagagaacactggagaaggcacacttggtgtctggaagggaaaagcagggaagagagcatcatcagatgcctgcgggtgaaggtgggcccgctatggccagcgtccctttttatttttatttatttatttatttgagatggaatctcgctctgtcgcccagactgtagtgcagtggtgcgatcacggctcactgcaagctccgcctcacaggttcacgccattctcctgcctcagcctcccgagtagctgggactacaggcacccgccaccacgcccggttaattttttgcatttttattagagacggggtttcaccgcgttagccaggatggtctaaatctcctgaccctgtgatccacccgcctcggcctccctaagtgcttggattacaagcgtgagccaccacgcccggccccctttttattttttattttttgagacggagtctcgctctgtcgcccaggctagattgcagtggcgtgatctcggctcactgcagcctccgcctcccaggttcaagtgattctcctgcctcaacctcccaactaattaggattacaagcatgtaccaccatgcctgactaattttttgtatttttagtagagactgggtttcaccatgttggctaggctggtctcgaacccttagcctcaagtaatctgcctgcctcagcctcccaaacagcggggattacaggcatgagccactgtgcccaacccaaccctggatctcttttaaacaagacaatgctcgctgttgccacagaacaatgggtggggtacatgtggcccagtgtgtttggccacataactgccaggccagagggaaagagactctcagactgtctccactcagatacaaatgtgtgtgttgtgtgcgtgtgttctggtctcatatttgtttgttttgagacagggtgtcgctctgtcactgagtctggagtgcagtggcgcaatcagagttcactgcagcctcaaactcttgggctcagttgattctcccacttcagcctcccaagtagctggaactacaggtgaacaccactgtgcccagctaatttattttatttttagtagagatgaggtctcactatgttgcccaggctggtcttgacctcctagcctcaagcaatcctcctgccttggtctcccaaagtgctgggattacacgtgcgagccattgcgcatggcttgtgttcttgtgtttcttcctttttctttcgagatggcgtctcagtctgccacccaggctggagtgcagtggtgtgatcatagctcactgtagcctcaacttcctgggctcaagcaatcctcttgatttcagcctcccgggcctggccagcatggtgaaaccccgtctctactaaaaatacaaaaatgtagccaggcgtggtggtgggcgcctgtaatcccagctacaccagaggctgaggcaggagaatcgcttgagcctggaaggtggaggttgcagcaagccaagatcgtgccactgcactccagcctgggcaacagagacagactctgtctcaaaaaaaaaaaaaaaaaacccaaacaagccacatttggagtttggggttcccagcaggactatttcccaagcctgagcctggctgtttcttccagaattcgttgcacgcattggctgggatcctcccccgccctccagcctcacagctattctctgtcctcccaccagcttcatgtactggactgactggggaactcccgccaagatcaagaaagggggcctgaatggtgtggacatctactcgctggtgactgaaaacattcagtggcccaatggcatcaccctaggtatgttcgcaggacagccgtcccagccagggccgggcacaggctggaggacagacgggggttgccaggtggctctgggacaagcccaagctgctccctgaaggtttccctctttcttttctttgttttttctttttttgagatgaggtcttggtctgtcacccaggctggagtgcactggcgcaatcgtagctcactgcagcctccacctcccaggctcaagtgatcctcctgcctcaccctcctgagtagctgagattacagacacgtgccaccacggcagactaattttattttatttttgggaagagacaaagtcttgttatgttggcctggctggtctcaaactcagggtgcaagcgatcctcccgcctcagccttccaaactgctgggattacaggcgtgggccaccgtacccagcctccttgaagtttttctgacctgcaactcccctacctgcccattggagagggcgtcacaggggaggggttcaggctcacatgtggttggagctgcctctccaggtgcttttctgctaggtccctggcagggggtcttcctgcccggagcagcgtggccaggccctcaggaccctctgggactggcatcagcacgtgacctctccttatccacttgtgtgtctagatctcctcagtggccgcctctactgggttgactccaaacttcactccatctcaagcatcgatgtcaacgggggcaaccggaagaccatcttggaggatgaaaagaggctggcccaccccttctccttggccgtctttgaggtgtggcttacgtacgagatgcaagcacttaggtggcggatagacacagactatagatcactcaagccaagatgaacgcagaaaactggttgtgactaggaggaggtcttagacctgagttatttctattttcttctttctttttttttttttttttgagacagagttttgctctcgtttcccaggctggagggcaatggcatgatctcggctcaccgcaacctccacctcccaggttcaagtgattctcctgtctcaggctccccagtagctgggattacaggcatgcaccaccaccatgcccggctaattttgtatttttagtagagacggagtttctccatgttggtcaggctggtctcgaactcccgacctcaggtgatctgcctgcctcggcctcccaaagtgctgggattacagacttgagccaccgcgcccagctatttctgttttctttctttcttcttcttctttttttttttctaagagacaggatctcactctgtccccaggcaggagtgcagtgctgtgatcatagctcactgcagccttaacctcctgggctcaagtgatcttcccacctcagcctcccaagtagctggaactacaggtgcacaccaccatgcccagctcatttttgtattttttttttttttgagacagtctcgttctgtcaccccggctggagtgcagtggtacaatcttggctcactgcaacctctgcctcccaggttcaagcgattctcctgcctcagcctcctgagtagttgagattacaggcatgtgtgccatcatacctggctgatttttgtatttttttttagagatggggtctcagtatgttgaccaggcttgtcttaaactcccggcctcaagtgatcctcccacttcagtctcccaaagtgctgggattacaggcatgagccactgcggccggtttgttttcttttttttttcgttttttggagacggaatttcacctttgttgcccaggatggagtgcaatggcacgatatcgcctcaccacaacctctgcctcctgggttcaaaccattttcctgcctcagccttcttagtagctgggattacaagcatgtgccaccacgcccggctgattttgtatttttagtagagatggggtttctccatgttggccaggctggtctcgaactcctgacctcaggtcattcgcccacctctgcctcccaaagtgctgggattacaggcgtgagccaccgtgcccggtggtttgtattctttttactgagagtcgtgaaaggcagtgatcctctgtcacatgtgatcttggctctcaggggacatttggcaatttctagagattttttggttgtcacaagtcaatggggaagactgttggcatttagtgggtagaggctggtgacgctgctgaacacccagaacagggaagtagcaggccctagatagagccatcgtggggaaaccctgctctaaggaaatggcgctattttataaccccacgttcctggcatgattaccaacagccaaaagtggagtccccccaagtgtgttcgtccatttgcattgcagtaaaggaatagctgaggccgggtaatttataaagaaaagagatttaaactgggtatggcagtttatgcctataatcccagaactttgggaggctgaggcaggaggatcgcttgagtccaggagtgtgagaccgagaccagcctggccaacatgacgaaactctgtctctacaaaaaatacaaaaagtaggccaggcacggtggttcacgcctgtaatcccagcactttgggaggccgaggcgggcggatcacgaggtcaggagatcgagaccatcctggctaacacggtgaaaccccgtctctactaaaaatacaaaaacaaaattagccgggtgtggtggcaggcgcctgtagtcccagctactcgggaggctgaggcgggagaatggcgtgaacccgggaggcggagcttgcagtgagccaagatcgcgccactgcactccagcctgggtgaccgagttgagactccgtctcaaaaaaaaaaaaaaaaaaaaaaatacaaaaagtagccaggtgtggtggcaggcacctgtaatcctgggttctcgagaccgaggcatgagaattgcctgaccccaggaggtggaggctgcagtgagccaagatcatgccactgcactccagcctgggcgacagagtgggactctgtctcaaaaaacaacaaaaaaaaagttctggaaatggatggtggtgatggtgatacttccacaacagcgtgaatctgcttaaggccaccgaactgtgcactcacaaatagtcgagatggtacattttatgttatgtgtatttcaccacaattaaaaactagttgtgggccaggtgtggtggttcatgcctgtaatcccagcactttgggaggtcagagggaggtggatcatgaggtcagcagttcgagaccagccaggccaacatggtgaaaccccatctctactaaaaatacaaaaattagccaggcgtggtggcacatgcctgtagtcccagctacttgagaggctgaagcaggagaatcgcttgaacctgggaggctaagattgcagtgagccgagatcgtgccactgcactccagcctggacgacagagtgagacttcgtctcaaaaaaaaaaccaaaaaaaaaattagctgtgggtcaggcactgtggctcacgcctgtaatcccagcactttgggagaccgaggtaggtggatggcctgaggtcaggagttcgaatccagcctggccaacatggtgaaagcccgtctctactaaaaatacaaaaaattagtcaggtatgttggcacacctgtaatcccagctactcgggaggctgaagcaagagaatcgtttgaacccaggaggtggacgttgcagtgagccgagattgggccactgtactccagcctgggcaacaaaagtgaaactctgtctgaaacaaacaaacaaacaaacaaacagacaaacaaaaaaactagttgtggagagagggtggcctgtgtctcatcccagtgtttaacgggatttgtcatcttccttgctgcctgtttaggacaaagtattttggacagatatcatcaacgaagccattttcagtgccaaccgcctcacaggttccgatgtcaacttgttggctgaaaacctactgtccccagaggatatggttctcttccacaacctcacccagccaagaggtaagggtgggtcagccccacccccccaaccttgaaacctccttgtggaaactctggaatgttctggaaatttctggaatcttctggtatagctgatgatctcgttcctgccctgactccgcttcttctgccccaggagtgaactggtgtgagaggaccaccctgagcaatggcggctgccagtatctgtgcctccctgccccgcagatcaacccccactcgcccaagtttacctgcgcctgcccggacggcatgctgctggccagggacatgaggagctgcctcacaggtgtggcacacgccttgtttctgcgtcctgtgtcctccaactgccccctcctgagcctctctctgctcatctgtcaaatgggtacctcaaggtcgttgtaaggactcatgagtcgggataaccatacttttcttggatggacacatcagcaccgggcttgacatttacccagttcccctttgatgcctggtttcctctttcccggccccctgaagaggtgatctgatttctgacaggagccctgagggaggaaatggtcccctttgttgacttttctttttctttatttttttcttttgagatttgctgtcacccagcctggaatgcagtggtgccatcttggctcactgctacctctcccactgggttcaagcaattctcctgcctcagcctcccaagtagctgggattacaagcatgcgccaccatgcctggctaagttttgtatttttagtacagacagggtttctccatggtggccaggctggtcttgaactcctgacctcaggtgatcctcccacctctgcctcccgaagtgctacgattacaggcatgagccaccgcgcccatccccctttgttgacttttctcatcctctgagaaagtctcagttgaggccagcacctccctcaagtgaattgaatctcccttttgaacaacaacaaataacaatatgacccagacgtggtggctcacacctgtggtcccagctactcgggaggctgaggtgtgaggattgcttgagcccaggaggtcaaggctacagagagctataatcacaccacttcactccagcctgggggacaaagtgaaaccctgtctgaaaaaaacaaaaaaagaaaaaggaaaaagaaacaatacgatcacaaagtagatattcatagtgtttattttcagtactcttttttttttttttttttttttttgagacggagtcttgctctgttgcccaggctggagtgcagtggcacgatcttggctcactgcagcctctgcctcccaggttcaagcgcttggctcactgcaacctccgcctcctgggttcaagcgcttcttctgcctcagcctccccagtagctgggactataggcacgtcccactacgcccagctaattttttgtattttttagtagagatggggtttcactatgttagccaggatggtctcgatctcctgacctcgtgatctgcctgccttgggctcccaaagtgttgggattatgggcatgagccactgcacctggccttttttttttttttttttgagatggagtttcgctcttgttgcccaggctggagtgcaatggtgtgatctcggctcactgcaacctctgcctcctgggttcaagcaattctcctgcctcagcctcccgagtagctgggattacaggcacctgccaccacgcctggctaatttttgtacttttagtagagacggggtttctccatgttggtcaggctggtctcaaactcctgacctcaggtgatccacccacctcggcctcccaaagttctgggattacagacatgagccaccgcgcctggccgtgtctggccttttttagttatttcttttttttttttttttttttttgagacagagtcttactccgtcgcccaggctggagtgcagcggtgcgatgtctgcgcactgcaagctccgccccctgggttcatgccattctcctgcctcagccttctgagtagctgggactgcaggcgcctgccactacgcccggctacttttttgtatatttagtagagatggagtttcactgtgttagccaggatggtctcgatctcctgactttgtgatccgcccgcctcggcctcccaaagtgctgggattacaggcgtgagccaccatgccaggcttttttttttttttttttttttgagacggagtcttgctctgtcgcccaggctggagtgcagtgccatgatctcagctcactgcaagctccacttcccaggctcacgccattctccagcctcagcctcccaagtagctgagactacaggggcccgccaccacactcggctaatttttttgtatttttagtagagacggggtttcaccatgttagccaggctggtcttgaactcctaacctcaggcgattcacctgcctcggcctcccaaagtgctgggattaaaggtatgagccacctcgcctggtgtgagccacctcgcccagcctgagccacctcacccagcctaagccactgtgcctggcctgattttggactttttaaaaattttattaataattatttttgggtttcttttttttgagacagggtcttactctgtcatccaggccatcctgtctgtctgtcatcccagtgatgggatcataccttgctgcagcctctacctcctgggctcaagcgatcctcccccctcagcctcctgagtagctgggagtacaggtgtgcaccaccacacctggctaatttttttttttttttttgtatatagagatggtattttgccatgttgaccaggctagtcttaaactcctggactcactcaagagatcctcctgccttggcctcccaaggtcatttgagactttcgtcattaggcgcacacctatgagaagggcctgcaggcacgtggcactcagaagacgtttatttattctttcagaggctgaggctgcagtggccacccaggagacatccaccgtcaggctaaaggtcagctccacagccgtaaggacacagcacacaaccacccgacctgttcccgacacctcccggctgcctggggccacccctgggctcaccacggtggagatagtgacaatgtctcaccaaggtaaagactgggccctccctaggcccctcttcacccagagacgggtcccttcagtggccacgaacattttggtcacgagatggagtccaggtgtcgtcctcactcccttgctgaccttctctcacttgggccgtgtgtctctgggccctcagtttccctatctgtaaagtgggtctaataacagttcttgccctctttgcaaggattaaatgggccaaatcatatgaggggccaggtccttcaggctcctggttcccaaagtcagccacgcaccgtgtgggtcccaaaattttatcaaggcacattcgttgcctcagcttcaggcatctgcccaaaaaggccaggactaaggcaaggagagggagggattcctcagtactcagcttttcacagaggctccaaaaggctaaggaatccagtaacgttttaacacaattttacaatttttttttttgagacggagttttgctcttgttgcccaggctggagtgcagtggcacgatctcggctcactgcaacctctggctcccgggttcaagcgattctcctgcctcagtctcccgagtagctgggattacaggcatgcgccaccacgctcggctaattttgtatttttagtacagaaggggcttctctgttggtcaggctggtcgtgaactctcaacctcaggtgagccacccgcctgagcctcccaaagtgctgggattacaggtgtgagccaccacgcctggccttttttttgagacagagtctcgctctcgcccatgctgtactgcagtgacgcagtctgggctcactgtaacctccgcttcccaggttcaagtgattcttctgccgcagcctcccatgtagagtagctgggattacaggcacccgccaccatgcctggctaattcttgcatttttagtagagatggggtttcacagtgttggccaggctggtctcaaacttctgacctcaagtcatctgcctgccttggccctgccaaagtgctgggattatagatgtgagccaccgcgcctggcctacagtttattctttggtggctcacacctgtaatctcagcactttgggaggccaaggtgggagaatggcttgagcccaggagttcaagtccagcctgggcaacatagcaagaccctatctctactacaaaataaataataaataaactaattttttttcttttaaaacccaactattcaacatggcaatgcaatatattaaaaaaattttttttttctttgaaacggagtctctcactgtcacccgggctggagtgcagtgtcgccatcttggctcactgcaacctccgcctcccaggtccaagtgattctcctgcttcagcctcccgagtagctgggattacaggcacccaccaccatacccagctaatatttttgtatttttagtagagatggggtttcactatgttgggcaggctggtctggaactcctgacctcgtgatctgcccgaggatcggcggcctcccaaagtgctggggattgcaggcatgagccaccgtgcccagccaaaacttttttatttttatttttttgggacacggtctcactgtgtaccccagactggagtgatagagtgctgtcatggctcactgcagcctcaacctccctgggctcaggtgatcttcctgcttcagtctcccaggtagctgggactacaggcatgagccaccacacccagctaatttttgaatttttttgtagagacagggtttcaccttgtggcccagacttgtctctaactccagggctcaagcgatctgcccaccttggcctcccaaagtgctgagattaatgcaatttaaaaaattttttggccaggcctggtggctcatgcctgtattcacaacaccttgggaggcaaaggtgggcagatcacttgaggtcaggagttcgagactagcctggccaacatggtgaaaccccctgtctactaaaaaaatacaaaaattacctgggcacagtggtgggtgcctgtaatcccagctacttgggatgctgagggtggagaattgcttgaacctgggaggcagaagttgcagtaagccaagatcatgccactggactccagcctcagtgacagagcaaaactctgtctccaaaaaaattgttttttttttttttttttcaaatcatcacactacagccaaggcctggccacttacttttgtaaataaagttttattggagccagtggaccagtgaggccgaatcttgcaggtgtaagatcacagtctatccttgaaaattttgatattttgttcattgggtggtttttcattaatttaaattttaaaaaataacatattaaaggctggtgtggaggtgcacgcctgcagtcctagctactcccagaggctgaggcgggagacttgcttgagcccaagagttgaagtccagcctgggcaacatagcgagacccccatctctaaaaataaaaataatgcattagaatattattggattcctgggcagggcacagtggctcacacctgtaatcccagcactttgggaggctgaggtgggtggatcacctgaggtcaggagtttgagaccagcctggccaacatggtgaaaccccgtctctactaaaaatacaaaaattagccaggcgtggtggcaggtgcctgtaatcccagctactcgggaggctgaagcacgagaatcgcttgaatccaggaggcggaggttgcagtgagctgagattgcgccattgcactccagcctggaggacaagagtgaaactccattcccctctgcaaagaaaaggaatattatcagattcctaagctttttggctccccctttagtttgggggctggggtggtgagtgtctgacctggcctcactgtcctccctggatgtgatgagacccaggtgtgggtcaggatgtcattcgtttgtccaccagagggcgcccaaactgctttgagctgctgggaaatggtgctcctagacttttagcaaacaaacaaaaaaaaatggcacatcggcaaatttcagaccattctttttttttttttttttggttccagagtagctgaaatctttgttcagttacaagcaggataaaatggaaactgcctgggagaggctgagaaaccttcttgcttgggggaggtggggcactgctagaattaatcgcttcacagaccagcccatccaggactcctcaaatttggcaaaaaagccattcattcattcattcatttatgtagagacgagggggatctggctatattgcctagattggtctcaaattcctggcctcaagtgatcctcctgccttggtctactaatgtgctgcgattacaggcatgagccaccgtgcctagctctagtggacttgaaatgttgccttgcccagggcccttatgttgaatggcccaggtccacttgtatggttctgtaccaaggttaaccccatcccataatgcctgggacagttgatgcaggacaatcagcttctgtgccattcaacctcaggactgagcatgctgggcattgtggggtccgaaggtggctcccctgtccccttcaaaataccctctttttcttttcttcttttttttttttttttttttttgagacgaagtcttgctctgttgccccagctagagtgcagtggtgcgatctcagctccccgcaacctctgcttcccgggttcaggcgattctcctgcctcagcctcctgagtagctgggattacaggtgcccaccgccacagctggctaatttttgtatttttagtagagacagggtttcaccgtgttggccaggctggtcttgaactcctgacctcaggcaacctgcccacctcagcctcccaaagtgctgggattacaggtttgagccactgggcctggccttttttttttttttttgagagggagtctcactctgttgcccaggctggagtgcaatggcgcgatcttgactcactgcaactccatttcccgggttcaagtgattctcctccctcagcctcccaagtagctgggattacaggtgcatgccaccacggccagctaattttgtatttttagtagagacagggtttcactatgttgatcatgctggtctcaaactcctgaccttaggtgatctgcccgccttagcctcccaaagtgttgggattacaggtgtgagccaccgcgcccagaccaaaatatgctcattttaataaaatgcacaagtaggttgacaagaatttcacctgcaaccttgtcaaccacctagaataaaagcctctgcagccctcccctaaagactcatcaatgtgaggctcaagaaccttcttaggctgggctcggtggctcatttctgtaatccctgcactttggaaggctgaggcaggaggatctcttgaggccaggagttcaagacaagcctgggcaacatagccagacctctgtttctatcccccacaaaaagaaccttcttaaaccggaattgagtcctacaacctcgataactcacaaataagcccgtgtggcctctcacagacttgggaagttctccaagtgtccagggagatgtgccaggcgctttcctgccgtgaccaccgtcctctgcctgctccatttcttggtggccttcctttagacctgggcctcactcttgcttctctcctgcagctctgggcgacgttgctggcagaggaaatgagaagaagcccagtagcgtgagggctctgtccattgtcctccccatcggtaagcgcgggccggtcccccagcgtcccccaggtcacagcctcccgctatgtgacctcgtgcctggctggttgggcctgttcactttttctcctggacagggaacagccccactggtgtcctttatcacccccacggcctctcctggcttggggctgacagtgacaagatcagacagctaaggggtcagatggaggatgtggagctgggtcccgtgctgtggaatagcctcaccgagatttgagtgccttctggggaactggttcccttgcagggggctgtgtggagaggcgcgctctccctgcctcacccatgctcatcctaactcggttaccatcacatctcttttttctttttttcttaaattttaagaaaaaagaaatttaatttttttgagagacagagtcttgctctgtcacccaggctggagtgcagtggcaccatcatgcctcgctgcagcctcaatgtctgggctcaagcgatcctcccacctcagcctcctgagtagctggtgcaagccactataccccacttcctatttcttaaaaagtcacagccctgtgtgtggctaatcctggacagaaatctagaagaagtcagctacttctggggcgtggctcacccagtgggcttcaggttagatatttcttatacttatgaggctgggtgtggtggcttatgcctgtaatcccagcactttgggaggctgaagtgggtggattgcttgggctcaggagttcgagaccaacctgggcaacatggcgaaaccctgtttctagaaaaggtacaaaaattagctgggcaggtggcacgtgcctgtggtaccagctacttgagggcctgaggcaggaggatcgcttgaacctgggaggtcgaggttgcagtgaactgagatcatgtcactgcactccagcctggtgacagagcaagaccccgtctcaaaaaaaaaaaaagaaagaaaaaaattcttatgcatagatttgcctcttttctgtttgtttgttttgagatggagtctcgctctgtcgcccaggctggagtacagtggctcaacctcggctcactgcaacctctgcctcccgggttcaagcaattctcctgcctcagcctcctgagtagctgggactacaggcgcccgccaccatgcccagctaatttttgtatttttagtagagactgactgggtttcatcatgttggccaggctggtctcgaactcttgacctcatgatccgcccgcctcagcctcccaaaatgctgggattacaggcgtgagccaccaggcccaggccgcaaggcgatctctaaacaaacataaaagaccaggagtcaaggttatggtacgatgcccgtgttttcactccagccacggagctgggtctctggtctcgggggcagctgtgtgacagagcgtgcctctccctacagtgctcctcgtcttcctttgcctgggggtcttccttctatggaagaactggcggcttaagaacatcaacagcatcaactttgacaaccccgtctatcagaagaccacagaggatgaggtccacatttgccacaaccaggacggctacagctacccctcggtgagtgaccctctctagaaagccagagcccatggcggccccctcccagctggaggcatatgatcctcaagggaccaggccgaggcttccccagccctccagatcgaggacagcattaggtgaatgcttctgtgcgctcattcagaatgtcagcggacaatggccttggtggtgtagaggaatgttggataagcaaatagagagctccatcagatggtgacagggcaaagaaagtcaaaaggagttcagaggccgggcgcggtggctcatgcctgtaatcccaggactttgggaggccgaggctggcggatcacctgaagtcaggagtttgagaccagcttggccatcatgacaaaaccccgtctctattaaaaatacaaaaaattagccaggcgtgggagtgggcgcctgtaatcccagctactcgggaggccgaggtagaaaaatcgcttgaacctaggaggcagaggttgcagtgagccgagatcgcgccactgcattccagcccgggaggcaagagcaaaactccatctcaaaaaaaaaaaaaaaaggagttcagaggcccggcatggtggttcacacatgtgatcccagaacttggggaggttgaggcaggagaatcacctgagctcagagttcaagaccagcctgggcagcacagcaagaccccatctctgcaaaaaataaaaatttagcccagtgtggtgatgagcgcctagttccagctactagggaggctaaggcaggaggattgcttgaggctaaggtaggagattgagactgcagtgacttgtgattgcgtcactgcgctccagcctgggtgacagagcaagcccttgtctcttaaaaaaaaaaaaaaattcaaagaagggtttccagagggccaggagggaggaagggagaggaggtgttttatttttttgcttttattttttattttgagacagagtctctctctgtcacccaggttggagtgcagtgctgtgatcttggctcactgcaacttctgcctcctgggttcaagcaattcttatgcctcagcctcagcctcctgagtagctgggattacaacactatgcccgggtaatttttgtatttttagtagagacgaggtttcgccatgttgcccagactggtctcgaactcctgacctcaagtgatccacccgccttggcctccccacgtgctgggattgcaggcgtgagccactgcgcccgccttgatctttacacaaggggtttagggtaggtagccttctctgaaccaggagaacagcctgtgcgaaggccctgaggctggaccgtgcctgttgggtttgaggccgttgtagctggagcaaacagagagaggggtaaaaaggcaggaggctaccaggcaggttgtgcagagccttgtgggccactggggaggactttggcttttgccctgagagcggtgggaagtgactgaatccggtactcaccgtctccctctggcggctcctgggggaacatgcttggggatcaggctgggggaggctgccaggcccaggaggtgagaagtaggtggcctccagccgtgtttcctgaatgctggactgatagtttccgctgtttaccatttgttggcagagacagatggtcagtctggaggatgacgtggcgtgaacatctgcctggagtcccgtccctgcccagaacccttcctgagacctcgccggccttgttttattcaaagacagagaagaccaaagcattgcctgccagagctttgttttatatatttattcatctgggaggcagaacaggcttcggacagtgcccatgcaatggcttgggttgggattttggtttcttcctttcctcgtgaaggataagagaaacaggcccggggggaccaggatgacacctccatttctctccaggaagttttgagtttctctccaccgtgacacaatcctcaaacatggaagatgaaaggggaggggatgtcaggcccagagaagcaagtggctttcaacacacaacagcagatggcaccaacgggaccccctggccctgcctcatccaccaatctctaagccaaacccctaaactcaggagtcaacgtgtttacctcttctatgcaagccttgctagacagccaggttagcctttgccctgtcacccccgaatcatgacccacccagtgtctttcgaggtgggtttgtaccttccttaagccaggaaagggattcatggcgtcggaaatgatctggctgaatccgtggtggcaccgagaccaaactcattcaccaaatgatgccacttcccagaggcagagcctgagtcactggtcacccttaatatttattaagtgcctgagacacccggttaccttggccgtgaggacacgtggcctgcacccaggtgtggctgtcaggacaccagcctggtgcccatcctcccgacccctacccacttccattcccgtggtctccttgcactttctcagttcagagttgtacactgtgtacatttggcatttgtgttattattttgcactgttttctgtcgtgtgtgttgggatgggatcccaggccagggaaagcccgtgtcaatgaatgccggggacagagaggggcaggttgaccgggacttcaaagccgtgatcgtgaatatcgagaactgccattgtcgtctttatgtccgcccacctagtgcttccacttctatgcaaatgcctccaagccattcacttccccaatcttgtcgttgatgggtatgtgtttaaaacatgcacggtgaggccgggcgcagtggctcacgcctgtaatcccagcactttgggaggccgaggcgggtggatcatgaggtcaggagatcgagaccatcctggctaacacgtgaaaccccgtctctactaaaaatacaaaaaattagccgggcgtggtggcgggcacctgtagtcccagctactcgggaggctgaggcaggagaatggtgtgaacccgggaagcggagcttgcagtgagccgagattgcgccactgcagtccgcagtctggcctgggcgacagagcgagactccgtctcaaaaaaaaaaaacaaaaaaaaaccatgcatggtgcatcagcagcccatggcctctggccaggcatggcgaggctgaggtgggaggatggtttgagctcaggcatttgaggctgtcgtgagctatgattatgccactgctttccagcctgggcaacatagtaagaccccatctcttaaaaaatgaatttggccagacacaggtgcctcacgcctgtaatcccagcactttgggaggctgagctggatcacttgagttcaggagttggagaccaggcctgagcaacaaagcgagatcccatctctacaaaaaccaaaaagttaaaaatcagctgggtacggtggcacgtgcctgtgatcccagctacttgggaggctgaggcaggaggatcgcctgagcccaggaggtggaggttgcagtgagccatgatcgagccactgcactccagcctgggcaacagatgaagaccctatttcagaaatacaactataaaaaaataaataaatcctccagtctggatcgtttgacgggacttcaggttctttctgaaatcgccgtgttactgttgcactgatgtccggagagacagtgacagcctccgtcagactcccgcgtgaagatgtcacaagggattggcaattgtccccagggacaaaacactgtgtcccccccagtgcagggaaccgtgataagcctttctggtttcggagcacgtaaatgcgtccctgtacagatagtggggattttttgttatgtttgcactttgtatattggttgaaactgttatcacttatatatatatatatacacacatatatataaaatctatttatttttgcaaaccctggttgctgtatttgttcagtgactattctcggggccctgtgtagggggttattgcctctgaaatgcctcttctttatgtacaaagattatttgcacgaactggactgtgtgcaacgctttttgggagaatgatgtccccgttgtatgtatgagtggcttctgggagatgggtgtcactttttaaaccactgtatagaaggtttttgtagcctgaatgtcttactgtgatcaattaaatttcttaaatgaaccaatttgtctaaactcgatgcacgttcttctgttcgcgcgcttctttttgtttttttttttttcctgagatggagcctggctctgtcacccctggctggagtgcagtggcatgatctcggcttactgcaagctccgcctcccaggttcaagcaattctcctgcctcagcctccctagtagctaggattacaggtgagtgccaccacgcctggccaattttttttttttttttttttttgagacagagtctcgctctgtcacccaggctggagtgcagtggtgtgatctcggctcactgcaagctctgcctcccaggttaatgccattctcctgtctcagcctcctgagtagctggggccacaggcgcctgccaccacgcccggctaatttttttttgtacttcttttagtacagacggggtttcaccatgttagccaggatggtctcgatctcctgaccttgtgatccacctgcttcggcctcccaaagtgctgagattacaggcgtgagccaccgcgggtggccaacgctaatttttttgtttttttagatggagtcttgctctgtcgcccaggctggagtgcagtggcgtgatctctgcctactgcaagctccgcctcccgggttcatgccattctcctgcctcagcctcctgagtaactgggactacaggcacccgccaccacgcccggctaattttttgtatttttagtagagacagggtttcaccgtgttagccaggatggtcttgatctcctgaccttgtgatccacccgtctcggcctcccaaagtgctgggattagaggtgtgagccaccacacctggcctagcctggctaatttttgtatttttggtagagacggggtttcaccatgttggtcaggctggtcttgaacttctgacctcaggtaatctgcctgcctcagtctcccaaagtgctgggattacaggtgtgagccaccgcgcctggcctcacttccttctgtcatctgtttgtggattggactccccaggagaaggacccagaaggggaagactcccagaactccgggcaagatgcaatctccgtgggctgccacagtgcctggcaggtgctgtgatggctgagctggtgattgtgttctctgctgtcgcttctctgagttggagattttgtcaagtcccctgctcatccattcatacactcgacaaatatctgttgagtgctaagtgcgaaccatgctctgccgtaggcttgtgggacactacaggggatataagaaatgaaagccgggtgtggtggctcacacctgtaatcctagcagtttgggaggccgaggcgggcagatcatgaggtcaggagatcgagaccatcctagctaacacagtgaaaccccatctctactaaaaatacaaaaaattagccaggcgtggtggtgggcgcctgtagtcccagctgcttgggaggctgaggcaggagaatagcgtgaacctgggagttggagcttgcagtgagccgagatcgcaccactgcactctagcctgggcaacagagcaagactccatctacaaaaaaaaaaaaaagaaatgaagtcttgatacggtggctcatgcctgtaatcccagcactttgggaggccaaggcaggcggatcacgagctcaggagatcgagaccatcctggccaacgtggcgaaacccagtctctactaaagatacaaaaaattagccaggcatggtggcgggcgcctgtagtcccagctacttgggaggctgaggcaggagaatggcatgaacccaggaggcagagcttgcagtgagctgagatcgcgccactgcactccagcctgggcgacagagcgagactctgtctcaaaaaaaaaacaaaaaagaaatgaaaatctccctgtctgtccttaaggacctgacatcattttattttatttatttttttgagacaaggtcttgctttattgcccaggctggagtgcagtggcacaatcttggctcactgcaacctccacctcccgggttcaagcgattctcctgcctcagcctcctgtgttgctgggatcacaggcgcgtacccggctaatttttatattttcagtagagatggggttttgccatgttggccaggctattcttgaactcttgacctcaagtcgtctaccgcctcggcctcccaaaatgctaggattacaggtgtgagccaccgcaccaagccaaatgttacttcattagagaaactccccctgaagaaaacttccttcctgccagttgcttttctgtccccatactctgtttaatattcttctagaatattcttctaaaatgtagcaattttttgtatctattctaaaaatggaggccaaggaaggcagatcacttgaggtcaggagtttgagactagcctggccaacatggtgaaaccatgtctctactaaaaagggtaagattttgaggctgcagtgagctatgacggcaccattgcactccaggctgggcaacagagcgagacaccatctcaataaaaaaaaaaaaaagcagggtgcggtggctcaagcctgtaatcccaacactttgggaggctgaggcaggcggatcatgaggtcaggagttcgagaccagcctgcccaacatagtgaaaccctgtctactaaaaatacaaaaaaattagccgggtatgctggcaggtgactgcaccataaaaaatgttcaagattaaacagggggacggtgaggtaacccagaaataagcaacagcagaaagcgccaccaccacaaaaccaggagaggaagatgtggtttctggagcctgggagctggtgagagccagaaactcataggagggaaagaagtgctgcagacatggtccccagcagagcgaggcggggaagagcccagcctgtcccccgctccaggctctatctcccaccagtgcctcccacgggctgagcccaacagggacaggctgatgaagcccaggcaatggtgccttactgggtggatcgaaggagggacagggttggcccaggggtgacacgacactggggtggttaggtccacaaacgtggctcatgcctgtaatcccagtaccttgggaagctgaggcaggaggattgcttgagcccaggagttcaagagcagtctgggcaacatagcaagaccccatctctaaaaaacgtttttaaatttctgggctcagtggctcatgcctataatcccagcactctgggaggccgaggcaggcggatcacctgaggtcaggagttcaaaaccagcctagccaaaatggcaaaaccccgcctctactaaaaatacaaaaattagttgggtgtggtggcgcatgcctgtaatcccagctacttgggaggctgaggcaggagaatcgcttgaactcgggaggccgaggttgcactgagccaagatcgcaccactgcactccagcctgacagagcgagacactgcgtcaaaaaaacagacaacaacaacagaaaaagttttaaaattaccagccggatgcgatggcgcacacctgtagtcccagatacttggaggctgaggtgggaagatctcttgagtccagcactttgggaggccaaggtgggcggatcacctgaggttgggggtttgagaccagcctgaccaacatggagaaaccccatctctactaaaaatacaaaattagctgggtgtggcggcgcatgcctgtaatcccagctacgcgggaggctgaggtaggagaattgcttgaacctgggaggaagaggttgcggtgagccgagattgcaccattgcactccagcctgggaaactctgtctcaaaaaaacaaaacaaaacacaacaaaaacccaaaaagagcagactgaccaggccgtctgggttcataacctggctctgccactgactcgctgggtgacaggcacctcagagcctcagtttccccacctgacaatggagacaaagctaatctccccctccccaggggctctggaagtggggcaggatggggctgcgcaggcgctcggagacaaaggcagggcctgtcatctttcctgcgtccacggggtggcacttccttcctgccttccgccttttgttttgggacgcttccaaaacgcccctgggagggaaaactgagcagcccacacaggaagcgtcctggagcctgcacacaggcgctcgataattgctcgattgacgaaattggtgctcaaccaagtggcaaacaggataagcgggctcagatggccaggaaaacgggagggcctgggaggtggcggctcgagggtgctgagactgagacgggagggtgggcaggaccggggtgcatccccaggcaggggtggggactgggagcacagcatgggtggggcatggcccagaggagaggccagaggtgatggaaggttctggtattcggccttggctgctgcattgggagcttgtatcagagctttgagggtgacacagacatgcagacattcagtttcctgacaatccatcgttctgccccgatggtcgccaaagggagggagggttgacagccacccattttacagagagaaataggaggctcgggtcactgtggctggattctgatcctcgccggttccagttctctggctcagaacggggccctggtaaaatgcgctgctggctccctggtctataggctcagcacccacccacccacccacttgtcctgcagggctgggggcagcctgcagcttggggaacgccacccctgcaggctggtggtcctgtcctgtctccgcaggctcaacagctctggccaggacagggtggaaggtgggaggaatttgtcccactcccagcaagtctgacacccacaactagtgtcccctgctgtccctccccttctcctgtccccaggccgttccccttccagcagcccgaggcatcccagaccacagctgtctgcagtgagtcagcctggagcctctgggctgagccgcggctgccagagggaggtggggagaggggtgcaggctgccctgccctgcagctggccctggcctaatcccctccccgctccccagtctggggtcagcaccctcctcccttgcaggcagtgattttccgtgatgatgaaggaataaaaaagccacggagggttctgagtgggagtccctggtccccatcaccccactgagcatggccgctggggtttcctggcaactttctgctccatccggagccgtccctcccctgggctgggctgctctggggctgttcctgggatggggagcggggagcttgggagtaaatagtgacatcagccacctagacaggcggggccactgtgtcaaggggccatgtcaggttcccttctcccagagctggggcttgtcttggaattggaaaatcctccccacattgccctgtggactgcaggcctggcgtgatcaaggacccctgccctcctgccatcccccttggtctcctccatgccagccttgctgtttcccctgcctggctcacagtctccacacctttatcccctgggggctcaagtctgggacaaatgacacctcctccctgggcctcccacagagccacagagcgtcaccccccaccaccccacagcgttcatttgtgggtcaggattaagagcacaagctctgaacacactcagctcagattaaagccctggctctgccacccgtctacagaaaaactgacacagtggcctccactggggtgtggctccatgaaggagggtctggcgggccacaggcttacagtactcatttctcttttcttttctttcttccttcatttcctttctctctctccttccttcctccctccctcccttccttccttctttcttcctttgtttctctctcttttttttttgagacggagtctcgctctgtcgcccaggctggagtgtagtggtgcgatctcagctcaaggcaaccaccacctcctgggttcaaacgattctcttagcctcctgagtagctgggattacaagcacgcaccaccacgcctggctagtttttgtgtgtttagtaaagatagggtttcaccatgttggctgagctggtcttgaactcctgacctcaagcaatctgccccacctcggcctccagaagcgttgggattacaggcgtgagccaccacaccggcttctcctctccctctcctctttctccttttccttcctttcttccttccttcccttccccttccttccttccttccttcattctttcttccccccgctcccccctctttttttttgagacagggtcttgctttgtcacccaggctggagcgcagtggtgcaatcctagctcactgcagccttgacctcccagggttgaggcaatcctcccacctcagcctcccaagtagccaggactacgagtgcacgccaccatgcctggctaattttttagtttttttttgtagagacaggagtctcactgtgttgtccaggctggtcttgaactcctcggttcaagcaatcttcctgccttggcctcctaaagtgctgggattacaggcgtgagccacagcacctggcccagtccacatttctaagtaaatatgggaggccagccaggtgcagtggctgtaatcccagcactttgggaggccgaggtgggtggatcacctgaggtcaggagttccagaccagtctggccaacatggtgaaatcccgtctttactaaaaatacaaaaattagccgggcgtggtggctcatgcctgtaatcccagcactttgggaggctgaggcggcagatcacaaggtcaggagatcgagaccatcctggctaatacggtgaaacccgtctctattaaaaatacaaaaaattagccgggcatggtggcaggagcctgtagtcccagctactcaggaggctgaggcaggagaatggtgtaaacccgggaggcagagcttgcagtgagccgagatggtgccactgcactccagcccaggtgagagtgtgagactccgtctcaaaaaaacaaaataaaacaaaaaatacaaaaattagcggggcgtgatggcaggtgcctgtagtcccagctacttaggaggctgagggaagagaatcacttgaacccgggaagcagaagttgcagtgagccgcgatcgcatcactgcactgcagcccgggtgacagagcaagactccatctcaaaaaaaaaaaaaaaaaaaagggaggccactggaggttgtggggccaccatgagagtcgacaagggtggcccacattcctagatgagttgcctggaggctgtagtcccagacctcaggggggtcccctccggaacccaaacactgtcatgccaatgacacaaaactggtcttcctggcctctcccatcctgtccagcctagaagggagactgagacttcagatccgacaaccatgggttcaaatccagccttgaaaacttcccatgcacaggcaagccccattgcgatctgtttcttttcttttcctttctttctttttttttttttttttttttttgagacagtcttgctctgtcacccaggctagagtgcagtggcgtgatctcggctcactgcaacctccgcctcacaggttcaagcgattctcctgcctcagcctcccaagtagctgggattacaggtgcccatcaccgtgcccagctaatttttgtatttttagtagagacgggagtttcaccatcttggccaggctggtctcgaactcctgacctcgtgatctgcttgcctcagcctgccaaagtgctgggattacaggggtgagccactgtgcccggctgcgatctgtttcttttaaccgtaaactgggaagaactttgaccacctcttagtccagaactatcagggaaggggcactgaatgccaggctggaggagggttgcatgaaaggcttgaccccagctactcaggaggctgaggcagaaggactgtttgacctgatgaattcgaggctgcagtgaggctgtgatcgcgccactgcactccagcctaggcaatagagtgagaccctgtctctaaaaaaaaaaaaaaaaaaatggctcagccatcccaagctgctcccagctgcctgcccctctaggtggcccccactactggcctgaggatgcactttatccccgccagggcctgaggagtcctggggaaaggtacccaagtctagtcctcaggagaagccgcccagggagcactagggcccgaggaagggttcaacctcgagactccatagcccctgggctcccgtccccagaaacaccagttacgagcagggggctggccatggtgtgaattcatgacctgcacacctcttgccgtaatgactaagtggctagagcttcaggctgccccactgctgccctctggagctcgagcaggtgcaggtgtgggtgcccaccctggcttggcctcttctcacctgggtggcttcggacacagggtggactcctcaaaggggctgcttcccatctgagaagccagcataatcctccaggggctactgatatacacacgctgcccctggtcctgagttagatcaccctgcccctagggagggcttgggggcttcactgctgaagttcagactccagggtggtccttgtcctgtgtgcctcagtttccccatctgtaaaatggatggtcctggggctgagcctcagtgctgcagggactagtgtggaaccctgtgtcctggtgcctgaaaccttactcccacctcagcagggctgggctgagccatcagcaagcctctggccggcctccatcattcaggaaagagccggtggctgaaggcacagctctcagagggagaacaaacgggggcgggggtgggatgggggcggggccggaggccaccggcctcaggctgtcctgggcatccagccagtgctgggcagtgagtcaggggccaggcatgtggagtggggcctctcccagccccggagatcaggcacctcccggaacccgcctgctgggcccccaccaggccgcgttcctctcccactcgctctccccatagaggggaccctggacctgcctgggggggacgaggatggggatgtggctggtgggcacagggcctctctgagccccggcacaggccgcctgatgggaccgtctcttccttggggaaactgaggcccaggttgctggggtggaggggatgtggagtgacagggcagggcaatggctcctcggccccctccgggaacaaagccaggtcattcctgtggggagggagcgccaaccccagggttggggggggcacgggccctgggtcaggggtacagataagcctgggctcccagaacccttgtcacagcggcacccctgccccatgcctgctttctctccagggcactcagagctgcagtttgcaggacgagagggagacgtgcccaatccccccatcccaggacgctcagccgtgcgtgggctgggcccactccactcccggcgcccacagttgccccagtgaaccggccagtggaggcatcctgtcccgtgtgcgggaaaggaatgaccgccaaggtgacagcagcgcttagccaaccctggcgctgacacctgacttgcaaactgctccctgcctgaggcttcaaggcaggcgagaggctttgtgtgtgtgacttcctccccgaagggacactggcaacagctggagacatttcctgttgttaaggctgagggggagctgctggcatttggtgggtggaggccagggatgacgttaactgttctactacgcccaggacagcccccaacacacacaacagcctggcccaatgtcacgagagctgaggtggaacagccctgttctgcttcaggtcttcaggtctttgggggtcaaggatgcaaatagaggactctgctcccaattcagctcacataaaagaaccggccgggcgctgtcgctcatgcctataatcccagcgctttgggaggccgaagtgggaggatcgcttgagcccaggagtttgagaccagcctgggtaacatagcaagatcccatttctacgaaagtacaaaaattacctgggcacggtggcatgcacctgtagtcccagcggcttgggaggctgaggtgggaagtttgcttgagcccaggaggttgaggctgcagtgagccgagatcatgccagtgcactccagcctcggcgacagagttagactctatctcaaaaaagaaaaaagagagaaaacccaccaacttggaaaattaaaacagccccaagggcatctaggaacagttaactgcacatctaaacccaggcccgccgttcttagaagctctgcaagctgcatggactgactcctgacatttcagggctagactcaaaaatccctttaaaaaaattttgtttctgagacggagtttcactcttgtccaagctggagtggaatggcacgatctcggctcactgcaacctccacctcctgggttcaagtaagtctcctgccacagcctccagagtagctgggattacaggtgcccgccaccatgcctggctaacttgtatttttagtagagatggggtttcaccatgttggccagactggtcttgaactcctgatgtcaggtgacccacctgccttggcctcccaatgttgctggtactacagacatgagccaccatgcctggtctcttcttttttttttttttttttttttttgagacagtctcgctctgtcgcccaggctggagtgcagtggctcgatctcggctcactgcgaactctgccgcctgcgttcacgccattctcctgcctcactcagcctcctgagtagctgggactacaggtgcccaccatcatgcccggctaactttttgtatttttagtagagatggggtttcaccgtgttagcctggtctcgatctccagaccttgtgatccgcccacctcggcctccctaagtgttgggattacaggcatgagccaccgcgcccggccccctttttttttgttgttgacacagggtctcacttcgtcccctaggctggagtgatgtggcgcagtcgtagctcaccacggcaacttcctgggctcaagcgatcctcccacttcaggccccgaagtagcgggggatacaggcaggcaccaccatgcccggctaatttatttttttcttagtagaggtggggtttcgcaatgttgcccaggctggtctcaaattcctagactcaagtgatttgcccgcctaggcctcccaaagtgctgggattacaggcatgagccacaacagctggcccctttctaagacagggtctcattctgtcacccaggctggagtgcagtgacactaccatggctcactgtagcctcaacctcccaggctcaagtgatcctcctgcctcagccgcccgagtagctgggactacaggcaagcaccaccagacgctgttaaagcttactgttccctctgcctaaaaacgcccctctctgattaagaactgcacttaagttcagtcgtggaaagggacatgatgaaacccaagcccaagttcacggaactaacacattcaagggcaaagctgtatctggggacaactgtcagtgggacccaacctccctctctcctccctcaggcaggcaggtggtgtgcacgcctcctttccttagcggtacccaaaacaccgaggatgggagagtgatgaacacattgattggccggccctggactggagtacatgttcagttagggtttattttggtatctgtcatagaaaacccccaaaaccagcagcttacacaaggtagaagttgagattggttctccccttctctctcccatttaaataagtttgtgctgatatctggctctgccatcatcagggaaccaggctcctgtcatccctaaaggacggcactcgtctgtacacgtggcagtatggctgccagggctccagccatcacacccacattccaggaaataggaagggggaagaaagggtgtatttgtcttttaagaatccttctagaagtgtcatgtaacatttccacatacatttcactggccagaccttaactataagggcagctgggaagtgttgtattttaactcccaaagtgctaggatcacaggcatgagccaccacaccaggccaaattttttaatttttttgtagagatggggtcttgccatgttccccagtctggtctccaactcctgggctcaagtgatctgccggcctctgccttctacagtgctgggattgcaggcatgagccaccacacctggcctccttatctttttaagtcccggcacaaaagtcgcttctgtcctccatgaagcctgcacactctggtgtggctcctgtcgcaatctggacctctctccagttctagagtgttgtctgcttttgtgttaattcctccgtcagcagtgggaggagaaccatgtcactcgtatcttgtctctctggtgcctagcagagtctgggcacaccgtggcactcaaacataccccctgaatgagtaagggccaaccttgaagtacctgggagctgtcatcgaataccacggtgtcatttgtcccatcccgtcacagatgtgaaactgcaggcctggcatagataagtcgactcccgttggttacctagctgaggccactctaggagctgaggccgaaaatcaggagaaaaagaaatccagtaaaaaaaaaaaaaaaaaaggccaggcgcggtgactcacacctgtaatcccagcactttgggaggccaaggcgggcagatcacaaactcaggagatggagaccatcctgtctaacatggtgaaaccccgtctctactaaaaatacaaaaaattagctgcgcatggtggcaggtgcctgtagtcccagctactcaggaggctgaggcaggagaatggcgtgaacccgggaggaggcggagcttgcagtgagctgagatcgcaccactgcactccagcctgggcgacagagtgagactccgtctcaaaaaaaaaaaaaaaaggaagacgtctagctgggcacgatggctcacgcctggaatcctagcactttgggaggccaaggcgggcgggtggatcacctgaggtcaggagttcaagaccagcctgaccaccatggtgaaactccatctctaccaaatacaaaaaattagctgggtgtggtggcgcatgcctgtaatcccagctactttggaggctgaggcaggagaatcgcttgaacccaggaggcagaggttgctgtgagctgagattgtgccattgcactccagactggacaacaagagtgaaactctgtctcaaaaaaaaaaaaaaaaagatctatgtccccacatttcatttgaaatggatctgaccacggcagatgcccgctgggtgcaagacgcagccacgaggctcctggctaccactcggtgtccaccagactccagaggtagtcgctgatgaatttcctggagagctgggtgctgtccaggtggatgggctgggccacactggggccatgatggactgaggcacagatgtaaggaaagcccgggacacacagcccctcacacaaccccacggggaaaaggatactgcctttactttttttttttgagacaaagtttcattctgtaggccaggctggagtacagtggtgcgatctcggctcattgcaacctccacctccagtggttaagtgattctcatgcctcagcctcctgagtagctgggactacaggcatatgccaccacgcctggcctcaggtcttctgcccacctcggcctcccaaagtgctgggattacaggcgtgaggtaccacacttggcctgctatactttactatatttattatagacgtggggtctcactgatacccaggctggtctcaaactcctggcctcaagtgatcctcccacctcagcctcccaggtagctgggacaacagatgcacgccaccacacccggctaatttttacagggtcctgctatgcaccattttatgtccctacctacagtgcacaagggttaaaatggctccccaaaaaggatactgcctttgaccatccctggctcacactcataatcccactcaattttactaacttggtggtaaagttgagccacgtacctgtacaggaagacaaaaaaaaaaaaaaaaaaaaaagaaagttacccagcaccaacttcaaccaagagccggactgcacaaggaggcacaggcaggcacacgttttggcagaacctacacggccgaggggattgtgactgtcgtgtcctcgtcgacctccttctcctgtcgctccagatccgcctcaatctccttgagctcttccagctctctggtgagctgagtagggcaggtcgttaaggaccccggctttcgagagagggctgcccctgcgctaactgcagctgggaggcccagggtcttggctctatttacgcacactctcttctttgagtcagagttttgctttgtcacccaggctggagtgcagtggcacgacctcagctcactgcaacctctgcctcccaggctgaagtgattctggagcccctgcctaccgagtagctgggattacaagcacacaccaccatgccctgctaatttttgtatttttagtagagacagggtttcaccatattggccaggctggtctcaaactcctgacctcaactgatctgtctgcttcggcctcccaaagtgctgggattacaggtgtgagccaccgcgcctggtcttttcttttttttttgagacagggtcttgctctttcacctattctggagtgtagcctcaatctcccaggaccaagtaatcctcccacctcggcctcccaagtagctgagactacaggtgtgtaccaccatgcccagcttattgattgattgattgattgagacagagtcttgttctgttgcccaggctggagtgcagtggcatgatctcagctcactgcaagctccgcctcctgggctcacgccattctcctgctgggaccacgcccggctaatttttttttgtatttttagtagagacggggtttcactgtgttagccaggatggtctcgatctcctgacctcgtgatccacctgcctcggcctcccaaagtgctaggattacaggcgtgagccactgcacctgacctaatttttttatttttgtagagacggggtctctgttgtccaggctggtctccaactcctgggctcaagtgatcctcccacctgggcttcccaaagtgctgggattacaggcttgagccactgcgcctggccctatgcgtgttttctagcaaggctgatcccctagcagaaaaggatataggaggctggccttcagacgggtgtcctcctccccagcctcctgaagcccagcttccagctgctgcagctccacgcctccctggtgcacctgctccttcgcattgagaaggctctgggccacttccttctccatggtgaggatctctgcagggtggagagaagcaggctccctagggtctgtccttccccaaggagagcagagagaaggtggttccacttgcctccactggcaagaaacatgccccttgtctgcagccctgtgtccagagagttctactggcaacttgtacaactactgtttcaccaaaacacatttaaatacactaaaaataaagcctcgtccttcacacacctaaaatataacaaaatagttggccaggcatggtggctcatgcctgtaatcccagcactttgggagcctgaggcgggaggatcgcttgaggccaagagttcaagcctgggcaacatagggagatcccatctctacaaaactaaaaaaaattaggctgggcatggtggttcacacctgtaatcccagaactttcggaggccgaagtgggcagatcacctaaggtcaggagtttgagaccagcctggtcaacatggtaaaaccctgtctttttttttttttttgagacggagttttgctcttattgcccaggctagagtgcagtggcgcagtcttggctcactgcaacctccgccttccagtttcaagtgattctcctgcctcagcctcccaagtcactgggattacatgcgcctgccacgacacccagctaattttttgtatttttagtagggacggggtttcaccatgttggtcaggctggtctcaaactgctgacctcgtgatccacccgcctcagcttcccaaagtgctgggattacaggcgtgagccactgcgcacggcaaccctgtcaatattaaaaacacaaaaaattagccaggtgtggtggcaggcgcctgtaatcctagctacttgggaggctgagacaggagaatcacttgaacccaggaggtggaggctgcagtgagccgagatcgtgccactgcactccagcctagggggctgaggaaactccatctcaaaaaaaaaaaaaaaaaaaaaaaggctaggtgtggtggctcatacctgtaatcccagcgctttgggaggcccaggcagatcacctgaggtcaggagttcgagaccagcctgaccaacatggagaaaccccatctctactaaaaatacaaaattagctgggcgtggtggtgcatgcctgtaatcccagctacttgggaggccaaggcgggacaatcacttgaacctgggaggcggaggttgcggtgagccgacatcgcgccattgcactccagtctgggcgatagagcaagactccatcttaaaaaaaaaaaagaaaaaaggctactggtggctgggcacagtggctcatgcctggaatcccagcactttgagaggccaaggcagaaggatcacttggacaggagtttgagaccaccctgggctatgtggcaaaaccccatctctactaaaaacacaaaaaattagctgggcattgtggtgtgcacctgtagtcccacctacttgggaggatcacctgaaccagggaggttgaggctgcagtgagccataatcgctgtcactgtgccactgcactccagcctgggtgacagagagagaccctttctcaaaaacccaaagcaaaccaaaataaaacaaagatggctactgttccttcctagaaacctgccaactcagagaatgcagattaaatgcccaggccaggcgcggtggctcatgcctgtaatcccagcactttgggaggccgaggcaggtggatcacgaggtcagtagatcgagaccatcctggctaacatggtgaaaccccgtctctactaaagatacaaaaaattagctgggcgtggcggagggcgcctgtagtcccagctacttgggaggctgaagcaggagaatggtgtgaacctgggaggcggagcttgcagtgagccaagatcacgccactgcactccagcctgggcgacagagccagactccgtctcaaaaaaaaaaaaaaaaaaaaaatgcttcccaaagggcccatgtttaagttttagaaacttacattatttttaatcagagtatgacatgtatatggttctgcaaacatgaacacacacgcacacacccttctccaagcctctccgtccctctgaagcagccactttcaagttttagctgttttctctggcactggcctccacatttctaagttaacttgcttatgctgctatttcttgatcggtctggttcggatggggcctgctgatttcctgttaggacagctgaggctctggctggctcacacagccttcccacccgctgtctgtccgccctcccgaaggacaaccaagtcttcttgaattcttccctgagtagtaatctctaccccatggctgttcattataaggtgctcctacctgacatattctcacacagctgaggggatactttttttttgggggggggggatggagtcttgccctgtcatccaggctggagtgcaatggcacggtctcagctcactgcaacctccgcctcccaggttcaagtgattctcctgcctcagcctcctgagtagctgggattacaggcacccaccaccacgcctggctaatttttatatttttaccggagacggtgtttcaccatgttggccaggctggtctagaattcctgaccttgtgatccgcccaccttggcctcccacagtgctgggattacaggtgtgagccaccgcaccaggcctttttttttttttaaacttttattattatttttgagacagtcttgctctgttgcccaggctggagtgcagtggcatgatctcagctcactgcaacctctgcttcccaggttcaagctattctcctgcctcagactcccgagtagctgggattacaggcatgcaccaccatgcctggctaattttcttatttttagtagagatggggtttcaccatgttggccaggctggtcttgaactcctgacctcaggtgatctgcttgcctcagcctcccaaagtgttgggattacaggcatgagccactgtgcttggcctatttttttgagacagtcttgctttgtcatccaggctggaatacagtggtgtgacctcagctcactgcagccgccacctcccaggttcaagcaattctcctgtctcagcctcccgagtagctgggattacaggcatgcgccacaacggccagctaatttttgtaattttagtagagaccaggtttcaccatgttgaccaggctggtctttaactcctgtcctcaagtgattcacccacctcggcctcccaaaatgttgagatgagaggcgtgagccaccacacccagcctgagggtgtactttaactcctctgccccacatctgtgacatgaaaaacaggtccagagacagaagttcagtgactcgcccacaggtacatagctccaaacctaggatgtgaactggatctgtttgacccaaagcctaggatccctggatcctgattctcagttttcttggccccagattcatccattctgctaacagccaggctggccgagtcacatctttctcctcaagccatcaaaggagggggagttaatggaggggtggaagaaggaggagggaaggagggaagagcctgcttgggacatcacattcaggataatattcagactcctcctgggcactctccaggcctggcagtcaggcggctgctgagctcatcttctgcttgccaagttcattctcacctcctgacctttgcatttgcaatccacgctgccaggaacaccgttcctgagccaccccgtggactggctccataggccaatcaaggctcagcccaggcctcctcataaaatgtgactgtataaggcacctgaaacccctggcactgcagctgtcagggagaaccgtatggcggttcctcagaaatcaaactttgaattaccatttgatctgcttctggctgaatacaaaaaagaactgaaaatagagtcttggctgggcgtggtggctcacgcctgtaatcccagcactttgggaggtcggggcaggtggatcacgaggtcaggagatcgagaccatcctggctaacacggtgaaactctgtctctaccaaaaaaaatacaaaaaaaaaattagccgggcgtggtggcgggtgcctgtagtcccagctactcgggaggctgaggcagaatggtgtgaacccgggagacggagctcgcagtgagccaagatcacgccactgcactccagcctgggtgacagagcgagactccatatcaaaaaaataaaaaaaagaaaatagagtcttgggctgggcgcagtggctcatgcctatattcccagcactttgggagaccgaggcgggcggatcacgaggtcaagagtttgagaccagcctggccaacatggtgaaaccccatctttactaagaatacaaaaattagctgggcatgttggcacgtgcctgtaatcccagctacttggcaggctgaggcaggagaattgcttgaacccaggaggcataggtcgcagtgagcagagatcacgctgctgtactccagcctgagcagcggagtaagactgtcctgggaaaaaaaaaaaaaagaagaaaatatggctgggcacggtggctcatgcctgtaatcccagcactttgggagtccgagacgtgtggatcatgaggtcaggagatcgagaccatcctggctaacacggtgaaaccccgtctctactaaaaaaatatatataaaaatattagccgggcgtggtggcgggcacctgtagtcccagctactcgggaggctgaggcaggagaatggcgtgaacccaggagacgcagcttgcagtgagccaagattgcgccactgcactccagcctgggtgacagagcaagactccgtctcaaggaaaaaaaaaatacagtcttgaagagatatttgggcacccgtgttcatagcagcgttattcaacacagccaaaaggtggatacaacccaagtgcccatggatggatgaatgaataaacacaatgcggtccatccttctatatcatgaaatatgactcagctttaaaatggacggaaattctggccaggcgtagtggctcacccctgtcatcccagcactttgggaggccgaggtgggcgatcacttgaggctgggagtttaagaccagcctagccaacatggtgaaaccccatctctactaaaaatacaaacattagctgggcatggtggcgcataagtgtgttctcagctacttgggaggctgaggtgggaggatcacttaagtctgggaggcagaggttgcagtgagccaagatcacaccactgcattcaagccagggtaatggagcgaggctctgtctcacagtaagtacacaaaatgaaaggaaattctgatacaggctatgacatggatgaacctggaggacattatgctccatgaaataagccagacacaaaagggtagatattgtatgattccactaggaagggtagatattgtacaattcctcgtaaggttcctagaggagtcaaatttgagacagaaagtagaaccctggtgggtgccagggtctgagaaggggatggggagtgagtgtttcatggggacagagcttcagtttggaaagatgagaaagttctggagatggatgatggtgctgatggttgcacagcagtgtgaatgtgcttaaggccactgaactgtgcagttacagatagtgaagatgggccggacacagtggctcacgtctgcagtcccagtactttgggaggctgaggcaggcagattacctgaggtcaggagtttgagaccagcctggccaacgtggtgaccccccgtctctaccaaaaatacaaaaattagccgagtgcggtggcaagcgcctgtaatcccagctactcaggaggctgaggcaggagaatagcttgaacccgggaggtggaggttgcggtgagcccagggcctggcagcagcagatgctccataaaacatctgaatgccttcaggaagaagggatgggctattgtcacaaccatttgacaaggaaggaagctgaggcacagagaatttaagaaactcacctcaagtctcacagcggacatggggatgggtgctaggattcaaacccggagctttgactcctgagccccagttcaaaccctgagacccccagctcctgctcacggagagctcagaaggggccaacccctccagactcctatatttaccactaaacccctggggggtgggggatggttgctgtcataaagccgatttctcagatggtgaaactaaggctcagagggggccgtcccagggggcatagggcaggagatgggagagtccaggagagaaggggttttgaggtgggcctggtcgccccctcccagcacccgggccccttcccccgtgggcccgcgaccacgctccgaccctcacctcgcagctgcttctcggcaccgtcttgcgtttccagcagccgctccaccacctgctcgtggcgccccagcagccgtcgctgctgcgcctccgcgcggttggcgcccagcaggctgagcagcccctggctcacctcctctatgtcgcggaaggcggccatgactacgccaggctccaacccgcgcaaatttgactgtccgcggggcccgccctcttccagaagaggttgctttccattggattttttgatacgtcagtcataagcaatggccaataggcatggggaacaggatcttagactgggctaagccgcctttggtctggcctggtgcgcctgcgaccactcctccgtcagtcatcggtgatgaccaatcggcgcaggaagggggaggctccgttatccttcccgatgcgcctgcgcgggagagaaagcggctgtttatttctccataggtcgagcgcttgctctgtgcagggtggggttctaacggcaaagcagcgagcagcttctcctggaacttacatcctacagtgtgtgcgtgggatacacaataagcatagagaataagtagattctatgagaggctgcatagcaaaatggcgtctgcagccagatttactgggttcgaatcccagcgttgccacttactagctgtgttaccctggacagacttcacctctctgtgcggtactttcctccttagtaaaatgagggtcatactagtgcctgtgtcagcgttggcgtgagaattcttcttattactttttttttagagacaaggtattgctctgtcacccaggctgaagtgcagtgccacaatcatagctcattgcaacttcgacctcctggcctccagcaatcctcctgcctccgcctcccaaagtgctgggattacaggcgtgagccaccgagcccagcctggcgtgatagtgtctcctattcagtaggtgctatatagttgtttaatgaaacatacatagaatcctagcatgtagctgggtgcagtggctcacgcctgtaagtctgagctctttggaaggctaagacaggaggatcgcttgagccctggagtttgagactagcctgtctcaaaacaaaacaaaacaaagaaaagatcagtgctgactctaaggtgctggttccatgctagacactggtatttctgcaagaaacaagatgttaagatggcatctttttttctttctctctctttttttttaagacagagtctcactctgttgcccaggctggagtgcaaggcattccagcctgcttcctgggttcaaggcattctcctgcatcagcctcccgagtagctgggattacaggtgcccgccaccgcacccagctgattttttgtatttttagtagaaacggggtttcattatgttggccaggttggtcttgaactcctgacctcgtgatctgcctgcctcaggctcccaaagtgctgggattataggcgtgagccaccgcgcctggcgtggcaacatttttatgtgtgctaccacctaaagaacatctcattgctttcctatgatttttttttcttttcttttcttttcttttttttttttcttgagacagagtttcgctgttgttgcccaggctggagtgcaatggcgcgatctcagctcactgcaaccaccacctcccaggttcaagtgattctcctgcctcagcctcccgagtagctgggattacaggcatgcgtcaccatgcccagctaattttgtatttttagtagagacggggtttctccatgttggtcaggctggtcttgaactcccgacctcaggtgatccacctgcctcggcctcccaaagtgctgggattacaggcgtaagccactgtgcccggccttcttttcttccttcttttttttttttttttttgagatggggtcttgttctgtcccccaggctgaagtgcagtggctcaggtgatcctttcatttcaaccttccaagtagccgggactacaggtgtgtgtcaccctttggtgcctgagagcatggcttcttgaaccagctgtgtaatgttggcatagacctcacttctttgtgcctaaaggcagtgaataacaattaggcagagtgaaatcaagaggggaaaagacttcaggttcactttctgatgctgcagcttacctgtgaccttggcaggttcctaacctttctaagccatagtggctaaagatagccctttcttattagctgccaggaggtgtcccagagataagccaggcaagattgtgcaactcgagcctgatagatctaaaggctcctgtggaaaaatgccacccgcccacctcccttccaaaaaagcaaagcgagaaccgcttcccagccattaggatggctactgtccaaaaccaaccaaccagccaagcaacctggaaaataacaagtgttgaccaagatgtagagaaattggaatgctgtgtacccttgctgagaatgtaaaatggtgcagctgctgcgggaaacagtatggcagttcctcaaaaaattaaaaatagtattaccatatcagcaattccacttctgggtatagccccaaaagaattgaaagcaggttgttgggccgggcgcagtggctcatgcctgtaatcccagcactttgggaggccggggcgggcggatcacctgaggtcgggagttcgagaccagcctgaccaacatggacaaaccccgtctctactaaaaatacaaaattagccaggcgtggtggcgcatgcctgtaatcccagctactagggaggctgaggcaggagaatcgcttgaacatgggaggcggaggttgcggtgagctgagatcacgccattgcactccagcctgggcaacaaaagggaaactccgtctcaaaaaaaaaaaagaaaaaaaaaagaaagaaagaaagagaaagaaagcaagtcatagagcagatatttgcaagtctatgttcatagcacccattatagcgaaagggtggaaacagcacaagtgtccttagatagaagaattaataaaacgtggttcatctctacaacacaattgtttttttttggttcatctgtacaacgcaatttttttttttttgagccaccatgcccggacacaatttttttttctttttcctttttttttttatgagacaggatctctctgccaggctggagtgcagagacgcaatcatggctcactcaacctcctgggctcaagcaatcctccaactttagcctcccaagtagctgggactacaggcacatgccactacacccagctaattattttttttttcctagagacaggggtctcattgtattgcctaggctggtctccaactcctgggctcaaatgatcctcttgcctcagcctcccaaaatgctggcattacaggtatgagtcaccgtgtctaccatgtctggcccataggacagaagattattcagccttaaaaaggaaggaggccaggtgcggtggctcacgcctgtaatcctggcactttgggaggccaaggcgggcggatcacgaggtcaagagattgagaccatcccggccaacatggtgaaaccccgtctctactaaaaatacaaaaattagctgggcctggtggcacgtgcctgtagtcccagctacttgggaggctgaggcaggagaatcgcttgaacctgggaggtggaaggtgcaatgagtcgagatcgcaccgctgcactccagcctggtgacagagtgatactctgtctcaaaaaaaaaaaaggaaggaaatgctgaccaggtccagtggctcacgcctgtaatcccagcactctggtaggctgaggcaggcagatcgcctgaggtcaggagttcaagaacagcctggccaacatggcaaaaccccgtctctactaaaaatacaaaaattagccaggcatgatggtgcacacctgtaatccctgctacatgggaggctgaggcaggagaatcacttgaacccgggaggcggaggttgcagtgagatgagatggcgccactgcactccagcctgggcgacaaggagcaaaactccatccccaccccgcaaaaaaagaaaggaaattctgacacatgccacgaggtggatgaagacatgttcagtgaaataagccagatacaaaaagacaaacactgcgtgattccacttagaggaggtccctagagtcgtcagattcataaaaacagaacgtagaatggtgggtcccgggggctggggaggggtatggggagtgagtgtttcatggggacagagtttcagttttgcaaactgagaatgttctggagatggatggtagtgctggttgcacaacagtgggaatgtgcttaatgccgttgaactctgcactttaaaatggttaaagtcgtacattttatgtcatgtatattttaccacaattaaaattaaaaatatactaaaaaaaaaaagcaaagcaagaaactgtgtgatggcgggaataggtcttaaaggtgagctgaacaagagaagtaaagataatgacaaatggtcctggcaatggctttgtgagaaagtttatttcctaagaacccttcttggctcacaaagccagaggaaactgacacgagtaatggaccttctgcctagaaatacactccttagcataacatttctgggtcttccaaaaaccttctgttatctcctgactgaacagcctagtggataaacagaggaaatgagaagtcaggagatatgattaccgctgggagatctgaggggaggggcccgtgggctgctagggccaatgatattccttttccagttctggtgccggcaacttgggggtgccgtttgcaaaaaagccatggaaggaactgtacacttttgtgcaccatttgtgcacagaatgtattcattttatacctgaagaaaaaagaactgtaaaaaaaaattaagaccaaatatattagaaaaagatttggtaggagatgctccaaactgttgacaatggtattcctaccaagtgggattatggcatgctgcaaggactaaacactgctgtattgtttgaatttttatttttatttttagatggagtttctctcttgttgcctaggctggagtgcaatggcgtgatctcggctcaccacaacctccaccttccaggttcaagcaattctcctgcctcagcctcctgagtagctgggattacaggggtgtgccagcacacccggctaattttgtatttttagtaaagacaaggtttatttttttctttttgagatggagtctcactctgtcgctcaggctggagtgcagtggtgcgatctcggctcaccgcaagctccgcctcccgggttcacgtcattttcctgcctcagcctcccagtagctgggactacaggtgcccaccaccacgcctggctaattttttgtatttttttaagtagagatggggtttcaccgtgctagtcaggatgatctcgagctcctgacctcgtgatgtgcccgccttggcctcccaaagcgctaggattacaggcgtgagccaccactcctggccttttttttgttttttgagacggagtctcactctgtcacccaggctggagtgcagtggtgcgatcttggctcactgcaaactctgcctcccgggttcacgccattcttctgcctcagcctcccgagtagctgggactacagacacacgccaccacacccagctaattttttgtatttattagtagagatggggtttcaccatgttggccaggatggtctcgatctcttgacctcgtgatccacccgccttgacctcccaaagtgctgggattacaggcgtgagccaccacgcccggccagagacagggtttcgccatgttggtcaggctagtctcgaactcccgacctcaggtgatccacccgccttggcctcccaaagtgctgggattacaggcgtgaaccactgcacccggctcgaattttaacttttttttttgagacggagtctccctgttgcccaggctggagcacagtggcacaatctcggctcactgcaacctgtgcctcccaggttcaagcgattctcatgcctcagcctcctgagtagctgggattacaggcgtgtgcaaatgcacctggctaatttttgtatttttagtagaggcagggtttcaccgtattgatcaggctggtctcaaacttctgacctcaggtgatgcccaccttgacctcccaaagtcctgggattacaggggttagccactgtgcccggctgaattttgacttttataataaatcgctataaattatttggcattagaatacaaaagtcaccgaagagccaagttttaggccaggcatagtagttcatgcctacgatcccagcacattgggaggctgaggtggggagatcgcttgagcccagaagtttgaggccagcctgggcagcatagagagactccgtctatacaaaaaataaaaaaaattagccaggcatggtggcacacacttgtagtcccagccactctggaggctgaagtgggaagattgcttgagccccggaggttgaggctgcagtgagctatgatcgcaccactgcactctaccctggtgggcaacagagtgagaccctgtctcaaaaaaaaaaaagaaaagaaaagaaagaaaaagattgatttttttttcctgaggtgttcacagcaggtgttcaacaaaactttgtacgatggcaatattcagtatctctgcaagtcaatacagtagccaccaaccacgtaaagctatcgagaactaattataattcattgactttatttatttacttatttttgagttggagcctcactgtcgcccaggctggggtacggtgctgcaatcttagctcaccgcaacctccgttttccatgttcaagtgattctcatgcctcagcctccccagtagctgggattacaggcatgcaccaccatgcccagctaatttttttctatttttagtagagatgtggtttcaccatgttggccaggctggcctcaaacataaatgatccacctgcctcagcctctcaaagtgttgggattataggcgtgagccaccgcgccaggcataattcatttacttaagatttttttttttttttttagaaacaaggtctcactctgtcaccaaggctggagtgcagtgggacaatcatagctcactgcagcctcgaactcctggcctcgagtgatcctcccacccgcctcagcctcctgagtagcttgggactacaggcacaagccaccaagcctgctaattataattaattaattcattcattcatttatagatggagtcttgctctgtcacccaggctggagtgcagtggggcaatctcagctccctgaaacccccgcctcctgggttcaagtgattctctggcctcagcctcccgagtagctgggactacagatgcccgctaccatgcccagctaattttttgtatttttagtagagacagggtttcacgatgttgcccaggctggtcttgaattcctgacctcaggtgatccacctgcctcagcctcccaaagtgctgggattacgggcgcgagccaccgcgcccggcctcatgtacttttaaatgaaaatagccacatgtagctagcggctacactattgttgggtgctggtctaggacagagcatgaaggtgtttactgtgatattcttgcaactgttctgtagctttgaacactctccaaaataagtccattttgaaaaagagatttgcagcagctcacgtgtgtaatcccagcactttgggaggccgaggtgggagagtggcttgggcaacatagcaaaaccccgtttctacaaaaaatttaaaaattagtccaggcgcagtggctcacgcctgtaatcccagcactttgggaggtcgaggcgggtggatcacttgatcaaggtcgggagttcaagactggcctgaccaacatagtgaaaacccatctctactaaaaatacaaaaattagctgggtgtggtggtgggtgcctctaatccaagctatttgggaggccgaggcaggagaattgcctaagtccaggaggcggaggtttcggtgagcctaaatcacaccactgcactccagcctgggagacagagggagactccgtatcaacaacaacaacaacaacaaaaagtcaggggtggtggcgcagcctgtggtcccagctagtcgggaggttgaggtgggaggatcgcttgaaccctggaggtagagactgcagtgagctatgattcgcaccactgcactccaacctgggagacagagtgagactctccaaaaacaaaaagtggtggctcacacctgtaatcccagcactttgggaggctgaggcgcgtggatcatctgaggtcaggagtttgagaccagcctgaccaacatagcgaaacccccgtctctaccaaaaatacaaaattagccgagtgtggtgggcacctgtagtcccagctacttgggagaatcgaggcagtagaatcacttgaatccaggaggcagaggttgcactgagccaagatcgcgccactgcactccagcctgggtgacgagaagcaaaactccgtctcaaaaaaagaaaaaagaaaaaaaaaaggaaagatatctatcttaaagcttaaaagggagcacagcgaaaaaagaaaagacacagaatcatcaacattattggtagctttattaaatttgtttaccttctaaaaaaaacgattacaaaaaagaatacttcatttaagtgtaatactggctttatggacgtaccgtgatcagaaagtgaaattaaagctcatggatatgcgtgagaagagaatgggcgcagaggcacgagtccagtatcccacggagagaaggaagtgtagagagatgcgtggacccatctcaggggtcacgcattcctgggccaaggagttgcttctaagagcttaaaataaatgcactggctggctccagggctggacacacaggcacagaactcttgtaccgcttctcaaagctgcccaaagctgcgaccttccccctcagacacccacaattaattgtttccaatcagctttggttttgttttctctgcaatttacatgcaaacaccatctatctattcatccatccatccatccatccatccatccatccatccatccatccatcctgcttgtctcctttgaccagccaagccctattttgttttacgtacattcccttcactaaaaatcaaagcaagccagtctacatcaagccaagaaacctacttttctaaggagagaaaccagtgctttgccttctttaatgaacctgcgagctctcagcgctttctcttgctgaaatgtggctttaaagccttggaggctgagctcactggcctcgaaagggcagcgcgcgtatttggtttggagcgcactcctgatcacaaagcacatttttagaggcttggaacccttccctttctgttgctcaccaaggaaaaggcacaagaaagacaatgatgtggagattcttaggggaccaaaacaggccatgaaggaaactgtgagtgtctctggcaagccccgtttcccgcaggctctgttccaggcagctccggaaagtctctaggttgttaaaaagcccagctggcccatgtttggttttcagcaaagccctgtctcttgaagtttgcgctgggaggcctggggacggccaacttttaatcgtacacacatggggtttttgggagccggccctgcgttttgccaacaagcgcatgccctgttttctttcctttgaggagagaaattctggagtcccggggaggaacaggacggccctgtgaccatagtctggggcctggcggcggggacgcagaagccaccctgagagccagattcttttcctgcgtcttcaggtctgaaggattttctaggaaaattaacatttgccaaggcctccatgtggggaagggaggggtttctgggtaatttgtctctttttcttttctttcttgagacagggtctcgctgtgtcgcccaggctgaagtgcaatggtgtgatcatagctcactgtagcctcgacctccagggctcagcctcccaagtagctgggactacaggcgcgcaccaccacgcctggctagtttttaaatttcttgtagagatgggtcttgctgtgttgcccaggctggtctttaacgtctaggctcaagctcaagctcttgccttgccctcccaaagtgctgggattacagacgtgagtcaccacgcctggccggtaatttctcattgtgaattgattgggtccctgtaagtcacagagcctgtcctgagtcccttcatctgaatgagggtgaaaagactgagttttctgtcccgggtgacaaggacagaatctgtcttgtgaaacaaccagaagaaaattcccctaagaaagccgtctagcggggcagtggacacaacactattctatatcagacaattaaatgtgggggatgaagggtgaaccccaactggtgcgtaataacacttaggattaaaatgaaaatatgcaagttccagtgactttcaaatctggcaacaaatcctaagattcccaccccctcctgcaacaatgattcaaaaatacaatatttttttcctctccctcttcctccatccataattaccagctgattgttctcaatgttcttcataaaacccacaccccagcatcagccctggcgccaatgtatacaagaattttgcttcggtctgcgctgtggccactttgaacaggggagccaagaaaacccacttggagctggagtcctgtggccgtcggggctcccccagggaagcagagggagagctcgcttgcctttgagccgtgggccttggggagtgtgagtggggtgggccagggaggaacgggaacagggaggagacggggacaagggacggtttgctcccggtctggctggtccccgcctccctcacggctactcttctgccgaggatgatgtagggctctcgtcatctgacattggggcaaactgaaacagagaagcagaattctttttgtttgggatcctttccaatcccccgaggcgccaacgtggtggctggcctggtagatatgatgggtaagcaggagggaggcgtggcccctggccccaaggaggtggcgatctgggggcaccgccttgaagaagcaaactcatgactgtggttgaggatgttcaccgggggtgagggatgcaaaggaatgagggtggacagtggctggtcagggagggtgagttctcagctgactgtgaacggcatcaaggagccagcgagcagggaagagcattccaggcagcggaaacagcacgtgcaaaggccctgggataagtgcagaggggtgtggcaataaggccagtgtggctagagggggagagaaacagtagtggggaaggtgagggtggttgtgcagggcctggtgggctttggagaggaccctggctttttcttttcttttttttgagacagagtttcactcttgttgcctaggctggagtgcaatggcatgatctcagctcactgcaacctctgcctcctgggttcaagtgattctcctgcctcagcctccttagtagctgggattacaggcaggcgccaccacgcccggctaattttgcgtttttagtagagatggggtttctccatgttggtcagtctggtctcaaactcctgacctcaggtgatccgcccatcttggcctcccaaagtgttgagattacaggcgtgagccaccgtgcccggcctagatttttttttgcttaaagacagggtcttgctctgttgccaggctggagtatagtggtccaatcatagctcacagtagccttgactatctgggctcaagcaatcctcctgccttagcctcccgagtagctgggactataggcatgcaccaccaggcccagctaatttttttttttttttgaggcggaatctcactctgtcacccaggctggagtgcagtggcgcgatctcagctcactgcaacctctgcctcccaggttcaagcaattctcatgcctcagcctcccgagtatctgggattacaggtgcccaccaccacacccagctaatttttgtatttttagtagagacagggcttcaccatgttggccaggctggtctcgaactcctgacctcaggtgatctgcccgccatggcatcccaaagtgctgggattacaggcgtgaaccagtgagtctggcctgaatgctccttaaacacgtcagacacacccctgcctcagggcctttgcactgcttgttcctgctgcccggaagaccatgtgattcactccctaacttctccaggtgttgactcaaatgtcatctcttctctgagggactccaatagcttccccatcactcgccatcccacgtccttgtttttttttttttttttttttctttgagacagagttttgctcttgttgcccaatgtcatgatctctggctcactgcaacctccacctcctgggttcaagtgattctcccgcctaagcctccagaatagctgagattaaaggcatgcgccaccacacccggctaatattttgtttttttagtacagatggagtttcaccatgttggccagcctggtcttgaaccccttatctcaaatcatccgcccaccttggcctcccaaagtgctgggattacaggcatgagccaccacgcctggcctctttctttttttttttcccagacaaggcggcactctgtcaccatgtagtgatgcaaccatggctcactgcagcctcaaattcctgggttcaggtgatcctcctgcctcagcctcccgagtagctgggagtacaggcatgcacctgtatttttgggggagacaggatctccctatgttgcccaggctggtctcgaactcttgggttcaagcaatccttccatctcggccccacaaggtgctgggattacagacgtgagccaccgcgcccagcctgattgtgtctcttaccagaatgctcactccataagggtggatactgttttctgttttgatcagtgctgtgaccactggggactacctagaactgggcctaacatgcagcaggcgctcaataaatatttttcaaatgagtgaatggtgactaagacacgcatttggaaccagacagacccaggcgtgaatactgttatgccaaccatgaccatgcagcctctctgtgactaatttcctcactggggcactatgaaggttcagcaagcagctgaccatattctgactttatccttagcgtgaaccccatgcacaatcagctcttcataaacatccgtctcctctggccaggcacagtggctgacccctgtaatcccagcgctttcagaggcagaagaggaagcatggcttaagctcaggtattcaagaccagcctgggcaacatagtgagacccagtctctacaaaagatgttaaaaaatgtccgggtgcagtggctcacgcctgtaatcccagcactttgggaggcagaggcgggcagatcacttgagctcaggagttcaagaccagcctggccaacacagtgaaatcccatctctactaaaaatacaaaaattagccgggcatggtggtgtgcacctgtaatcccagctactttggagactgaggcaggagaattgctcgaacctgggagatacaggttacagtgagccaagattgtgccactgtactccagcctgggtgatagaacaagactttgtctcaaaaaacaaaacaaaaaaaactcagccaggtgtggtgacgtgcgcctgtagtcccaactactcaggaggctgaggtgaaaggatcacttgagcccaggaagtggagtttgcagtgagctttaattgtgccactgcactccagccttggtgacagagtaagacccagtctgaaaacaaaaacaagaccaggcatggtggctcatacctgtaatcccagcactttgggaggctaaggcaggtggatcacgaggtcaggagtttgagaccagcctgaccatcatggtgaaaccccgtctctactaaaaatacaaaaattagccgggtgtggtggtgcacacctgttatcccagctactcaggaggctgaggcagcagaatggcttgaagccgggaggcggaggttgcaatgagcccagatcgtgccaccgcactccaccctgggcgacagagtgagactctgcctcaaaaacaaaaacaacaaatctctgtcctttcagagacccacccatcccgtgcctacccggccggattgagactcaccgagcacttgatgttcatgcgggaatacagcatggacgcaatctcactctgccctgcgtccaaggccaccatcagagctgtgctcccatcctgcaaagtatccggtgctatgaatgacgtccccatgctgtgctcccgccctccccggggtgcacctggttggagactcacgcgatctgtgagtgagatgtcacagctgggcacggccagcagcagccccgcgatctccttgtggccgtgctcacaggcgcacatgagggccgtggagccgtcatcatcttgcacgttgacatctgcctcacaggccagcagggctttgacaacgtccacccgcccgtggctgacggccagcatcagggccgtctgtcctgcctggggagggcaaggaacaggattatggttcatgcaggccccagggcaggacaccccctggtctagaacctgctgtagctcccacatactctgatggtgaaatgtaccctcaacttgctgatctcctcctgaatctcaaacaaccctcccgtcaccaggggagtaataaatccacagagacagaaagcggatgagtggttgccagaggctgggagaagcgggggcggaggaaatgatggatacaggtttcctttgggggtgaagagaacgttctggaactagacggaggtgttggttgcacaacagggtgaatgtatttcatgccagtagtgcttttggttttgttttgctttattttagagacagggtcttgctctgttgcccaggttggcgtgcagtggcacgatcgcagctcactgcagcctcaacctccccaggctcaggtgatcctcccacctcagcctcccgagtagctgagactacaggcatgcgccacaatgcctggctaatttttgtatcttttgtatagatagggttttgccatgttgcccaggctaattgttcctttaaaagggttaattatttttttttggagatggcgtctcgctctgtcaccaggctggagtgcagtggcgcaatctcggctcactgcaacctccacctcctgggtccaagcaactctcctgcctcagcctcctgagtagctgagattacaggcgtgtgccactacgcccagctaatttttgtatttttagtagagacagagtttcaccatgttggccaggatggtctcaatctcttcacctcgtgatccgcccgcctaggtttacaggcgtgagccatcgtgcccagcctaaaagggttaattctgggcactgtggcttacgcctgtaatcctggcactttgggaggccgaggtgggaggactgcttgaccccaggagttagagatcagtctgggcaacatagcgagaccatgtctctagtaaaaaataaaattaataaaatacagcctggacaacttggcaaaaccccaactctaaaaaaaaattagccgggcatggtgccgcacgcttgcagtcccagctacttggtggcctgaggttggaggactgtttgagcatgggaggtcaaggctgcagtcagctgtgattgcaccactgcactccagcctgggtgacacagtgagaccctgtctcaaaaaaataaaaaatagagataaaataaaataaaaagttagaaataaaggagttaatcttatgttttgtgaatttcaccttctttttttttttaatagagaggaggtgggggtgggggggtgtctctaggttccccaggctggtctggaactcctgacctcaagcaatttatcccgctttgttctctcaaagtgctggggttacaggcatgagccaccttggtgagcctcaccttaatttttttttttttgagatggagtctcactctgtcacccaggctggagtgcagtggtgcgatctcggctcactgcaacctccgcctcctgggttcaagcgattctcctgccttgagtagctgggattacaggcacatgccaccatgcccagctaatttttatatattttttttagtagagatggggtttcaccatgttgattaggctggtctcaaactactgacctcgtgatctgcccactttggcctcccaaagtgctgggattacaggcatgagccaccgcacccggctaattttttttttttttttttgagacagagtctcactctgtagcccaggctggaggacagtggtgcgatctcagctcactgcaacttccacctcccaggttcaagcgattctcctgcctcagcctcccgagtggctgggattataggcacgtgccaccacgcccagctaattttttaattttttagtaaaggcagggtttcaccatgttggtcaggctggtcttgaacttctgacctcaggtgatccacccacctcagcctcccacagtgctgggattataggcatgagccatggcgcctggccttaattttttgaaaatgaagccactaaaaaaatttcttggaaattaaaacaaaattaaatcaataaagataaggcaggatcatgcctgttatgccccgtcacagctccattttgttcctttgctgtcttcagactgttgacgatccctctcctcctcactgtcctcagtgggtcctggcttccctgctcttttgcccagacacctgttcataagccccagtcacctccacagtgcctgtttctgcttcccaacacacagctgaagggagcgctcaaaccaggaatcaggccacgccacttccctgcctaaattcccctggcggtttcctgcagccctgagtccaaactggcttgagtcccggtgctccctaaaatgcttatggcttgaagaacgggctagtgagcttcaggagaccatgcctgcttgttcgccatttcagtccccagttttcggcccagggaacccagctgctgctcaatgaactgtccagcaggatgtgggatggggtcatattaagaaaggtaaggaccctcatatcctctactccttctagtttccacaagaaggtcctgtgtcagagacagcctggccatgaagagcagggctctggagttagaccacctgggtttgggcctgtcactcagctgggatgtcataaagtaggaagagccacctggatctgcagcagccggggtccccatacctggctggctttggcattgatgttgccaagccggaagagctgaaggacagtctcgatgtcgtcctgggtcttcagggtggccagggcggtgagcataatagggctgtagccagcacggttctgtttgtccaccttgcagacacctaagagacatggtgtgaaccctcagaccagggatcgctgctagtggactgccccaaggaacgtggataccacgtctcgtccatcagtctaggcatgccctaatccctcccttttctcagaggaccccactctgccctagaggtctccatctccattagacctggggctcctaaagttggagacagttcctcctccatcagatttggggcccctgatgctggcatctatatttagggctgagaatagaaactgggtctcccctgttaattttggaacagccatttaccctcagactggcccatgtctcccccatcagattgtgggccctgagtccttcatcagcccgggaggctgtctcccccagtaggagagggaagggcaagtttcttactaactgaggaccacgtcttctttccaagccccagacttgaggacgcatccctctcttagaccagggctccagagatgtcacctccatcatgcaggcgtgttaggttcacacgtttccctaacatcacttctgccttttccattatgctggctaaaggtagggcccgtgcctcccccaccagactgggaaggaagtgtctcctccatcagactgggaggacagcatctcccccataagaccaggagggtagagtctctgctatcagactaggagagtcatgtctccctcgttagactgggaaggtggtgtctcactcattagactaggagggtggtgtctctgccatttgactgggaagacagcgtctcctctatcagactgggagggccacattcccccaacaatgaaccgggaagatgatgtctcctccattaaactaggcaggtggtgtctcctccatcagcctgggagggtggtgccccccccatcagactggaagggtggcatctcccatatcaaactgggaaagtcacatttcccccatcagactggggaggcagcatctcctccatcagactaggagggccacatccccaccacaatgaactgggaaggtgtctcctccatcagcctgggagggtggcatctcctccatcagactgggagggcggcatctcctccatcagactgggagggccatataccccaccccattgaactgggaaggtgccgtctcctctatcaaactggaaggctggtgtccctccacatccaatcggaaggtggcatctgccacatcagactgggagagaggtgttccctctattatactgagaaggccgcgtctcctccatcatcttccccatcagatggggagggcagtgtcttccctatcagactgggcatggcggacagctggctggtttagagccgcctcgtcctccccgctgggctcaccgctgtcgagcagctgctgcaccacggggaagttggcatgagacacggagtagtgcagggctgtgttgccgttgctgtcggcgatgttgaccacgtagtccagcagccgcgcagacatggcccggaacgtgaccaggtgccgccgcaccagctcggggtgtgcgtcgctgcggcaggccaggcgcagccactcctgcagcactgtggtgtaggccactttctgcatgcgagtcaggtgggagaggatgtgagggcgggggaggcccactgggacaccccccaccccagatgcgcccccggagcaaagcgtggtgcccttgtcctggaaaacgatctcaagggaagtgcagaccctcccaaagggaagtgtagacatctctgtcccaataagacccttggagtgaggtgtggactttgcaatccccaacacgttccccaaggaaggtgtgagcacctccaccctggatataatttctctctctctcttttttttttttttttgtgagacagagtctcgctctgttgcctaggctggagtgcagttacatgatcaggactcactgcagcctcaacctcctaggctcaagctatcctcccgcctctgcctcccaagtagctgggaccacaggcgtgcaccactatgcctagctaatttttaaaacaatttgtagaggctgagtgcagtggttcacgcctgtaatcccagcactttgggaggccagggtgagcggatcacttgaggtcacgagttcgagaccatcctgcccaacatggtgaaaccccatctctactcaaaatacaaaaaattagccagacgtggtggcacatgcctatagtcccagctacttgggaggttgaggcaggagaattgcttgaacctgggaggcagaggttacagtgagctgagatcgcaccactgcactccagcctgggtgacagagcaagactccctctcaaaaaaaaaaaaaaaaaaaaaaaaaaaaagaatttttttgtagaaatggggtctcactatgttgcccaggctggtcttgaactcctggcctcaagcgatcctcctgccttggcctcccaaagcaccaggatgacaggcatgagccactgcgcccagccctggttataatcgccaaagtcaagtgtagatgcccaaaaagggaaatctgggtgccccgcccctgaagcccccaggaagaacaggaacccaaggccaggcttggccagtgagtgttcatcctccagcctctccccatctccctggcctctctccgaggcccatgacttgagcaccaccacccccatgctctgggcttcagtgtcagggtccccactaggcaggagcaggaagtcactgaggatgaggagaggccacgggtggggtggaggtaggggtccggggggtggccaacctaggcccagggccagatcgtaccagctcccgctctgtgagggcgttgggattgtccaggtacttttccagggccaagcaggctgagatgaggtcagggcttagctccatcctgccaggaacagacaaagcggggaactaagtaagccccgctgcggtgcctgggaagggacttgacattctgcaccacgtcactcacaatagggtcacctgaatggtggcatctcagaccctccttcacccgggacacacatttacattgcaccccaaggggcagctgtggggaacatgcagacccccaagggagagtggacacacaagccaaagtttattccaaatgcccactggcagatggaaaatatttcccaagggcaaattttttcaccaggggaataaaaaagagacataaatagaacagacaggtagaggaaacgtcccaaagtaggtgggtgattttgggataaactttggctggtcccctaaatcctaaccccggcagcccaaaatagttccaccaggccctttagcaaagcctccagaacttcagatgcccagaaggagcaagtgctcgtttgctaattcagactaaagtgtgcatgactgataggagggtccttcaaagggcttgaacggtgggggtttgaggcagaggtcatccacccccggccctgcctgaatccctcctacccagaaaactgacctgatctcctcctccgtgtttgatcctgatgccccctcagcagtgggtatgtgctgagattctcgagacagctgacactcctgccggctggtcttggccgctgccgtccctgcaggcctgagctggggggcttcggccacactcggaaccctctccctcggctctggggcctcgttctctgtgctgtcgttgtctgagatgttctctgctgtgctggagtcctcggatgacgactcatacctggggaggaacgagcggggagggggagatgctgcaggtgggatgagaaatggtgggaaaggaaggcagggatctggtgatctgacctctgtgggcctcagcttccccatctgttcaatggcagtattgacattccagggttgtgggatgtggtttacagcaactggcacacagtaagcgctcaataaacattagcagtgattatgatcatgctcggggggaggggcactgcttttcacctcctgccttttgacacttctagcatactcaccctccttttttttttttttttttttgagatggagtcttgctctgttgcccaggctggagtacagtggcactcactgcaaactctgcctcctgggttcaagcaattcttctgcctgagccttccaaatacctgggactacaggtttgcaccactgtgctcggctaatttttgtattttttagtagagtcggggtttcgccatgttgccatgttggccaggctgatctcgaactgggtttacaggtgtgagccattgcgcacagccacctctagccatttttttttgagacggagtctcgctctgtcgcccaggctagagtgcaatggtgtaatctcagttcactgcaacctctgtctcctgggttcaagcgattctcctgcctcagcctcccaagtagctgggactgcaggcacccaccacacccagctattttttgtatttttagtagagatggagtttcaccatgttggccaggcttgtctcgaactcctgaactcaagtgatccacccgcctcagcctcccaaagtgctgggattacagatgtgagccaccgcgcccggccacttctagcccttttaacacaggtgattcagactcctgttccactgcaaatagggctctctcgtgtttcttgctggctctggacaaaacctaatcaagcttctaggctcggcattcaaggccccaaaccaaccatcactccctgcacctcccacttctcgtgtcactctgctttcccacctctgagcctttacccacgctgtgcccctgccagaagagccctccccacaccctctcttcaccttgctagctcctacttctcccgtaccacctgtgtctcctccttctgggactcccctagggccacctgtgtctttcttgaggacctgcaccacctgagtgttccccatcacggctccaaccacccatcagcacccagctccccactggaccaggagctctatcagggcaggaagcggcgtccggcaccttctgtggggtagagctgtgcagtggttacaccttgagctcttgagccagggcacgcagggctgactcctgggtcactgagtgagctccagaaatgcgcttagccttcctatgcctcagtttcctcatctctgtgttgtggtttgattaaacgaattaaccaaagcaaggagctcagaatgaggtaattaggaggctctcgtgcgtggatgaatggaggaggggcgggaagtatggggtggggggtggggtcttctcctctcacccgccgttgacccccacgaactggaggctcctccggtgggccgtggggtctgcaacctcctctttccgtttcatgatagatcgcacgcctgccgggggcccgcctggaggggaggacagcggaggtgctgtgagagtccttcagggccagactccgaactggcgccatcccggtgccccgtccctcttggcggccacccaccacttaccggtgcccccggcctcctcggactcttgggaggctgcttgcctggtgggctccctgtgggtgggctcctgggtgggcactcggcctgtgctcttctcaggctgtgtaagggaggctacctcggaccccgggggtgacgaagacgattcggcaggaacttctgggaggcctggagggacaggaaatgagtgtctgctcttggtcataaaagccaaaccaccacagccctgcgggtcatacaccctgggccaggagctgtaacagggctgatttttgtgttaccacatccagtcttcctgccccttggagggaaatcggattattacagatgaggaaactgaggcacagagctgccaaggtaaccccttgagcaggtggcagaatccagtttggtgcctgcccagcagctagtcagggacagggacaaccctgtggccccatattcctggctcgagcctgagtgatcgctaaaaataaggtttggccgggcacggtgactcatgcctgtaatcccagcactttgggaggctgaggcgggcgaatcccctgagatcagaagttcgagaccagcctggctaacatggtgaaatcccgtctccactaaaaatagaaaaattagccgggcgtggtggtgcacacctgtcgttccagccactcaggatgctgaggcaggagaattgcttgaacccgggaggcggaggttgcagtgagcagagatcacgccaatgcactccagcctgggcaacagagcaagaccctgcctctcaaaaaaaaaaaaaaatcagagataaaaacacgtcttggtggccaggcacagtggctcatgcctgtaatcccagtactttaggaggctgaggcgggcagatcacgaggtcaggagttcaagaccagcctggccaacatggtgaaaccccatctctactaaatatacaaaaattagctgggcgtggtggggggatgcctgtaatcccagctactcaggaggctgaggcaggagaattgcttgaacccgggaggcagaggttgcagtgagcagagatcacaccactgcactccagcctgggtaacagagagagactgtcctgaaaataaaaaataaaaaaaaaaaacacatcctgactaaaaaaacgaaacgaaacaaaagaaaacaaaagacaacaaaaaacacccacccaggttggtctgaggacaaaggtgacttcctggatgctgaggtcctggactgccagccaacagcgtggaataaaagtccagtttcctttttgtgtagccaccaatgtcttggaatccactcaggtccccctgggccacatatggctgctttgtaagacagggtttcactcccttcactgaagcttgagtgcagagatgcgatcttggctcactgtaacctgtgcctcccggattcaagtgattctcctgcctcagccccctgagcggcaggcagtaaaggcgcatgccactgtgcccagctaattttctgtaatgtttgtagagatggggtttcactatattgcccaggctggtcttgaactcctgagctcaagtgatccgccttccaaagtgctgggattacctccggagcagcaccgcccagcccatgcatggtttctgtgtcagcatttcctcgggggttccccttcctgtcccccggggcgccaactctgaagaccaattaatttgaattccctttaatggctaaaaaggttgttggggtttttttctttgtgacagggtcttgttatattgtccaggctgctctagaactccagagcgcaagggatcctcccacctcagcctctcgcatagctgggattataggcatgagccactatgcccagccttaaattttttttttttgccatatacagtgacttcctgaggcccacaggcaatattcaactttagtacagaacggtgaccaaatgctggacataggcaaagagtaacatagacagggccggctgcatgagacactcggtcatcggcatggccaacagcatccccagaccagggtgtggccagctcataccacagaaaacataaaaaccatgccagagccaaggcttgaactcatgagtggggaactgagcgagagcaaacgccagttgctatgtccctctatgatttttctttttaaacttggcaataaattcacgtgaaacaaacaaacatactgcatggccaggagacagattcacaatctcaatctctgcccaaaatgcagggcgcctaacttgaaatcctggagaggccgggcgcagtagctcacgcttgtaatcccagcaccttgggaggctgaggtgggtgggtcacttgaagtcaggaattaagagaccagcctggccaacatggcaaaaccccgtctctactaaaaatataacaattagccaggcatggtggtagacatttgtgatcccatctatttgggaggctgaggcaggacaatcgcttgaacccggaaggcggaggttgcagtgagccgagatcatgccactgcactccagcctgggggatagagcgagactcttgtctccaaaaaaaaaaaaaaaaaaaaaaaaaaaattctgggagagccaaaaaatgaggtggagcaatattatgctaagtgaaagaagccagatgcaaaagggacaaaaacattgcatgatttgattcacaggagttccctagagttgtcaagatttattattattattattattattattatttgatacagtctttctccatcgtccaggctggagggcagtggcgtgatctcggctcactgcaacctctgcctcccaggttcaagtgattctcctgcctcagcctcctgaatagttgggattacaggagccaaccaccatgcccggctaatttttgtatttttactagagacaaggtttcaccatgttggccagggtgatcttgaactcctgacctcaagtgatccatctgcctccgcctccgaaagtgctggggttacaggtgggaaccactgcgcccagccctagaattatcagatttaaacagacagaaaatagaatggtgggtgccaggggctgggggaaggagaatgggaagtgtgtttaatggggacagtttcagtttggaaagatgagaaagttctaaagatggatgatggtgacagttgcgcaacagtgtgaatgggctggacatagtggctcacacctataatcccaggactttgggaggctgaagggggaggatcacttgagcccaggagtgtgagaccagcttgggcaacatagggagatcctatccccaacaaatacaagaaaaaacaaacaaacaaaaaaatgatgcaaatgtacttaatgccactgaattacatactcaaacatggataagatggttaatttttttttttttttttttgagacggagtcttgctttgtcatccaggttggagtgcagtgatgcgatcttggctcactgcaacctctgcctcctgggttcaagcgattctcctgcctcagcctcctgagtagctgggattacaggtgtgtgccaccatgcctggctaatttatatttttagtagagatggggttttgccatgttggccaggctggtcttgaactcccaatctccagtgatccacccgcctcagcctcccaaagtgctgggattacaggcttaagccaacacgcccggccagatgccaaattttatgttctatctatgttaccacaatattgtaaatggcgaaaaaatttgagaggctgaggcaggaggatcgcttgaggccaggagttcaagaccagcctgggcaacatagcaagactctatctctgcaaaaaattaaaaagttagccaggtgtggtggagtgcgcctatagttctaactacttgggactatacttggctgagatgaaaagattgcttgagcccgggagtttgaagttacattgagctatgacagcactgctgcactccagcctgggtgacggagtgagaccctatctttaaaaaaaaaaacaaaaaaacaaaacaaaacaaaaaagccaggcgcggtggctcacgattgtaaccccaggactttgggaggccaaggcaggccaatcacaaggttaggagatcgagaccatcctggctaacacggtgaaaccccatctctactaaaaatataaaaaattaggaaggcatggtggcacgtgcctgtagtcccaggtacttgggaggctgaggcaggagaatcgcttgaacccaggaggcagagcttgcagtgagccgatattatgccactgcactccagcctgggtgacagagtcagactgcctcaaaaaaaaaaaaaaaaaaaaaagtaaaaaaaatcaaacaaactagagcagaaccaaagcccactccgccccaacagaaaagcaggcagtgacttcaaaacctgggatggctccttccagtctaaggaattgaaggttagacttggaatgctagcataacaagaagtaataataaaattgatgatacttattattgttatcccactggggaatggggccaactgacactaaaatttacacaaaagaactaaagtccattgataagctaagacaattctacaaaacaagagcacagatggagtagttggtctgtgagagagtaaaacatatttcaaagctacaaccatgagaacagcagggcatttttgcattaataaatggaccaatgggacagagaagacaggctccaatctctgggcactgagggtaagacagagggggtttccccaagccagtgggagacggtggattctgtggtgtggttttaggagaagcagcttactttacatgagaagagccaagctggatctctatctcatagcatacacaagaaagaaactgtgaagaattaagatgaaggtacaactacaaagctaaagggagataatgtagcagactatcagggactcaggaaagggaaagattcattcattcattcattcatccagtgacacagtctcactctgttgtccaggctggagcgcagtggcgtgatcacagctcattccagcttcgaactcctcggctcaagtgatcctcccacttcagcctcccgagtagctgggactacaggcatgcaccaccatgcccagctaattttttttttttttgagagagtctcgcattgtcaccccaggctgaagtggagtggagccatctcagctcactgcaactttcgcctccctgattcaagtgattctcctgcctcagcctcccgagtagctgggattacaagtgcccgctaccatgcccagctaatttttttgtatttttagtagagatggggtttcactatgttggcaaggctggtcttgaactcctggccaatttttgtattttttgtagagatgggggtcttactatgttacctaggctggcctggaactcctgggctcaaagcaattttcccaccaaagtgttgagattacaggtgtgagtcaatgtgcccagttaagattcttttaaaaattcttccaagcacaatccacatatgcaaaatataatggttttacctatattcaaaatgaagacttctggccaggcatggtggctcatgcctgtaatcccaacactttgggaggccaaggtgggcggatcacttgagtcaggagttcgagatcagcctggccaacatggtgaaacccagtctctactgataatacaaaaattagcagagtatgctggcaggcacctgtaatcccagctactcgggaggatgaggcaggagaattgcttgaacctgggaggcagaggttgcagtgagccgagatcgtgccactgcactccagcctggatgacagagcgaaactctgtctcaaaaacaaaaacaaaaacaaaaatgaagacctctgagatcctcatgggtgcggtgggggagtgccggagtttggcacaggcaaaaattggcaagggataatcttctagaacagggtcaacaaacctgggaagggctagatagcaaacatttttggttacgtcacacataaggactcggttgcaactgctcaactgtggcatagttctaacacaaaaccagtcacagacagtatgtaagtgattccgcgtggctgtatccaataagtttgaatttcacataatcttgtcatgtcaagaaatattttttttgagacagggcaagactctactttttttttaatgtgaaaaaaaaaaatcaataaataaactagagcagcgcctaaatcccattctgccccaacagagaagcaggcagtgacttcagggaacttcttttttttcttttttttttttgagatgaagtctcgctcttgttgcccaggctggagggcaatggcgtgatctcagctcactagcaacctctgcctcgcgaggtcaagtgattctcctgcctcagcctcccgagtagctgggattacaggcacccgccatcatgctcggctaatttttgtattgttgtagagatgggtttcaccatgttggccagggtggtctcgacctcctgacctcagttgagccaccacgcccagtctacttcaggcaacttctgttgcccaggctggagtccaatcatagcttgctgcagcctcaaaatcctgggcttgccgggcatggtggctcacgcctgtaatcccagcactttggggggccgaggtgggtggatcgcttgagcccaggagtttgagaccagcctgggcaacatggtggaaccccatctccacaacaacaacaacaaaattcctgggctcaaggaatcctcctgcctcagcctcccaagtagctgggactacagctgcacgccaccatgccaaactaatttttaattagtagagatggggtgtcactatattgcccaggctggtctcaaactcctggcctcaagtgatccttctgccttggcctcccaaagtgctgggattgcaggtgtgagccactgtacttggcccaaaatatatttttaaaatcattcaaccattaaaaaaaaacgtaaaaatcattcttagctgtgggttgtagaaaaacaggtttcaggctgtatctggcccacaggccgtagtttgccagttttgactctggaagataccagcaacttctaaaaactgctcagagaaaaaatggagaaaggctacaagtaattgacttacagaggaaccttattaggcatacacagagaagccctatctctcactgcctatcagagctatgccaatgaaaacaataaggagggctgaattccgaggctcgcatttataatcccagggctttgggaggctgaggtggatcacttcagccctggagttcgagaccaacctgaacaacagagcaagaccccatctctacaaaaaattacctgaatgggatggcacttgcctttagtcctagctactcaggaggctgaggtggagggatcacttgagcccgagaggtttaggctgcagtgaactgtgactgtgccactgcactccagcctgggtgacacaatgagaccctgtctcaaaaaacaaacaaaacaatgaggagataccattatgtagcagctgtcagatggataaaaaaaattagaaagacagggccgggcgtggtagctcacacctgcaatcccagcactttgggaggccaaggcgggtggatcacctaaggatgagagtttgagaccagcctggccaacatggtgaaaccccgtctctactaaaaatacaaaaatcagccaggtgtggtggcgggtgcctgtaatcccagctactagagatgctgaggcacaagaatcgcttgaacctgggaggcggaggttgcagtgagccaagatcgcgccaccgcactccagcctgagaaacagagcaagactctgtctcaacaaataaaaaaagaaagaaagaagaggccaggcgcggtggctcacgcctgttaattccagcactttgggaggccaaggcgggcagatcaactgaggtcaggagttggagacgagcctgaccaacatggagaaaccccgtctctgctaaaactacaaaattagtcaggcgtggtggggcgcatgcctgtaatctcagctactcgggaggctgaggcaggagaatcgcttgaacccgggaggtggaggttgcggtgagccaagatcacaccactgcactccagcctgggcaacaggagtgaaactctgtctcaaaaaaaaagaagaaaaattagaaagacagataaagccatatgttggtgaggatatgagaaaatggacaacttgaaccggagcacggtgttaggagtgcggatagggacagccttttttggaaaggatcagacaggacttggagtgaagttgcaaatcctctaggaatgggcagtcccacagaaggggtcgtgtgaagatgactccagcattgttcgtggtggccggaaattagaagtaaccagatacctactgtgaagggattagagaagagggtaggtgggtggggtggctcacacctgtaatcccagaactttgggaggccaaggcggacagatcatgaggtcaggagttcgagaccagcctggccaacgtggtgaaaccccgtctctactaaaaatacaaaaattagccaggcgtggtagcagggcatctgtaatcccagctacttgggaggctgaggcaggagaattgcttgaacccgggaggcagaggttacagtgagctgagatcacgccactgcactccaccctgggcaacagagcgagattccatctcaaaagaaaaaaggaagaaaaaaaagaaaataaaaagtgataaatcagatttacaaacctcagtgtggagagttcaaaaatagtgtaaggagaggaaaaaataagaaacagaaagagatttttttctgaagcacaacaccatttaaggaaatgaaacacgcacaaggcatatttttcaaggacactcaaatgtctaaataagtttctggaaggtggtttgtaaggaatgggattagatggggtgggggtggcactgacggtggagagcggagggtggtgagcttcagtctgtgggtgctgtttttacatttttaaatggatgggaaagaagaatttaatttgggactcatgaaaagtatgtgaaatagaaatttcagggtcctgcaaataaagttttattggaacgcagccacgttcgttcatttccatattgtctacggctgcttttgcaactgcaaaatgaaggccctgaagcaccaaattcaaaaaggtatacattaaatatgtgcatttttttgcatattaagtatacgtcaataaaatcagaaaaagctgggcacggtggcacacgcctgcaatcccagctatttaggaggccgacgtggaaggatcacttcagtccccgagttcgaaaccagcctgggcaacatagtgagacctcatctggcaacatagtgagacctcatctcaataaaaaggatgaaaggaataaaaataaagtggggaggaaaaaagaactgaggcagagttgaatcaatgcaatagagaccgtatgacctgcaaaagtgaaaatatttactgacccttagcattgaaggttgaaggtggaggctgaaggtgaaaaaataataagtaatacaagagaagtggtctgcacaggctaacgtggatggttgtcaggagctgaggaatgagatgaactcagttttggactcctgaaggccaaaataattttttttttttttgagacggagtctcactctcactctgtcgcccaggctggagtgcagcaatgcgagctcagctcactgcaatttccgcctccccggttcaagcgattctcctgtctcagcttcccaagtagctgggattacaggtgtgtgccaccacacctggctaatttttgtatttttagtaggggtttttgccatgttgcccaagctggtctcgagctcctgacctcaggtgatctgcccactttggcctcccaaagttctgggattacaggcatgagccaccacacccggcccatgtaaattctttttttttttttttttaatttaggctgggtgcggtagctcattccagtttgttcaaccccttgataagcccgagcctttgcttatctcagggcctttgtccctgctgtgctcctccctggaacattgttttttccacctcttctggtgacttctttcatgtcttcattcaaagatgctccttggagggtgggtgccgtggctcatgcctgtaatcccagcactttgggaggccgaggcgggcagaccacaaggttaggagttcaagaccagcctggccaacatagtgaaaccccgtctctactaaaagtacaagaaaattagctgggtgtggtggtgggtgcctgtaatcccagctacttggaaggtggaggcaaggagaatcgtttgaacccaggaggtggaggttgcagtgagcggagatagcgccattgcacaccagcctgggtggcagtgcaagactccatctcaaaaaaaaaaaaaaatgctcctttgagaggctatagggccaagagctgaccttgggcaccaagtatcaaccatgcctggtaccatgatgaacacttgacatgaattgattctctccccccccacccccgcccacaagattggtcttgctcaggctggagtacagtggcgtggtcacaactcactgtagcctcgaccccctgggctcaagcagtcctcctgttttggcctccgaaagctccaggattacaggcataagccactgcgcctggctgaattgacatattaaagcctcacattattccagtgacactgtgccatcaggacccccgatttgcaaatgaggaaactgaggcatagagagatttcatcgcttgctcaaaggccgagaaggttggatcacctgaggtcaggagtttgagaccagcctgaccaacatggtgaaaccccatctctactaaaaatacaaaaattagtcagtcatggtggtgcatgcctgtaatcccagctactcgggaggcggaggcagaagaatcgcttgaactcgggaggcgggggttgcagtgagccgagattgcatcactgcactccagcctgggcgacagagcaagactctgtctcaaaaaaaaaaaaaaaaaaaaaaaaaaaaaaaggaagatatagaaatgaattaagacattccagcttggctcaagcaaggcagagattggggctggctgcagcaagagggaataaaatgagactccaggaagaactttcaggcagcagcttgaatgcaaagaaggtggacatcgctatgtctgtttgtcctgcaggcagaaggcctctcagctgctctgggaggcacgtctggaatggtggttgcctctcagagattccgaggctgggccaggcggagcctctggcagggggccagaacctcaggacctggtgtttgggatagacacagaacaggcgggtggtgtccagagctggccaggaacaacacgggccggcgagaaaacacagctgggtccctgccctccagcctgtgccctccagtctgttggtaggggctctggccacctgacatttgaggctgggatgagaacttgggccctaccttcgagccctgctgcagattcaagctgtcctggttatttatttcttttttcttttcttttcttttttttgagatggagtctcactgtcatccaggctagagtgcagtggtgcgacctcggcccaatgcaacctccgcctcctaggttcaagcaattctcctcccttagcctagctaggactacaggcgtgtgccaacacgcccagctaatttttgtatttttagtagtgacagggtttcgccatattggccaggctggtcttgaacccctgagctcaggttatccacccacctcggcctcccaaagtgctaggattacaggcctgatgttctgggtttggatactggctcagttgagccacttcctggctgtgtgacacaggacaaatgaatctcctccctaagcctcagtttccccaggtatgaacaggttgaccagaacattatcagcagaagcagcaaccagtacttaaccgtgtgcattaattcataaattctccacctctctagaggtggagagcattatcatgccacttcacagatagggacgtttagggctagagaggtgatgttgctcaccagtatcacacagcatgagtttgaacgcacctggcagagcctccctgaccatgtttccagaagaacagctgtcattattattgttgagacacagtttcactctgttgcccaggctggagtgcagtggcacaatctcagctcactgcaacctccggctcccaagttcaagcgattcttgtgcttcagtctcccaagtagctgggattacaggtgccggccaccacgcccggctaatttttgtatttttagtagagacagggtttcaccatgttggccaggctggtcttgaactcctggcctcaagtgatctgcctgcctctgcctcccaaagtgctgggattacaggcgtgagccaccgtgcccagccagctgtcattattattattaattattttgagatacagtttcactctgtcgcccaggctggagggcagtggtgtgatcttggctcactgcaacctccgcctcccgggttcaagcgattctcctgcctcagcctccggagtagctgggactacaggtgtgcgccaccacgcccggctaatttttgtatttttaatagagatggggtttcactgtgttggccaggctggtcttgaactcctggcctcaagcgatccacctgccttggcctccaaagtgtgggattacaggcgtgagccactgcgcccggcccagctgtcattattatgagtcatttgggtggcttctcccagggacctcaggacaacccagcagctgacattctgcacagccggcatcccctttcctggcatgaggactcagtacttcctctgggaagcacccccttcctccctcaaaggccacagggcttgggtggggctcccctacccccggcgtccatggctaggcagacagggacaccgtgattggctcagcaatgggcacatgacccaggccagccaatgagggccccctctgggatttttactggtgctctttggattaaggatctccctctccactaaactggacagacagatgcctggagcagtgaggtcactttcccttgcctgcctgaaagagaagctcccagggaaaacaagaagagaaaggcaccaagttagattcctgatgatatctgagcactgaggccagcgtggtggctcatgcttgtaatcccagcactctgggaggccaagacaggagcatcatttgagcccagaagtttgagaccagcctgggcaacataacaagactttgtctctacaaaaaataaaaaaaattaacgaggcacagtggtgcatgcctgtagacccagctacttgggaggctaaggcgggaggattgcttgagcctaggaagtcaaggctgcagtgagccatgattacaccaactgcactccagcctgggcaatggagcgagactctatctcttaataacgacaacaagaacaagatatttgtgcacctggatccagccatgcctgaagctgtcatcagttacgtaataacacatttccttttcactgcttgaacagctccgagattgattcctgccacttactgaataaacagggaggtttctgcctggtaaaccaacagccttggggaactttcccccaaatacctcccactttctggatactgacaaagtggcagtcacctaatttctctgcatggttgctacagccctgagggttggctgcacaattctcctccttttgtggatgataagacagagactctaagagttggactgatgtgtctggtggaaggtcgggggctggggctggaccttggcattctttttttttttttttttttttgagacagagtctccctctgttgcccaggctggagtgcagtggtgtaatctcagctcactgcaacctccgcttccctagttcaagcgattctcctgcctcagcctcctgggtagctgaggtttacaggcgcacgccaccacacctggctaatttttgtatttttagtagagatgggtttcaccatgttggccaggctggtctccaactcctgacctcaagtgatctgcccgcctcggcctcccaaagtgctgggattacaggcatgcgccaccgcaccctgcctggaccctggcgttctgagagtccaggatgagccatgggaagaaagaggccccccccccccaagccattctcccctgcctgcctgcgaccgcttacctgctgctccatcgcagcttcgctctgtgatgctaatcttcttcaccatatggacgttgctggtagctgcagcgggcactgggcacattgtctccaccacctcctggctgcggaacacaggtgggctctcaggcctaccaggcattgccagggccctcagccctgtgccgtaaggctccaggctctgggcccgctgtgcgggggcgccagcggctgtgctggccaccacctccacctcccgtggcccttctaccacccggactgtatccacgcggaccgggctgtccggcggtggccaggcctggggctgggggtcagcctgccgggcctgagctgcctgcagctcctgcagcgccttcttgagctgggtctccagcacagcgaccttggcggcgagggcagcctccccatcaggcatgcccaagtcccgttctcgaacccaggtgcccacactccgggtctccagtgccactgggtcctctgggggatcggggaggtccaggcagagctcgctgcgaccccggcccgctgtggggtggcccaggaacttctggctcttaagttgtactgtgagctgccgcttttcctcctggagcaccgagagcttcacctggagcacagggatcagcttcacctgctcctccagctgccgcagcttccgcagggcacccgccatctgctcccgcacgtgggccaggtgcccggcactgggaggcaccggtgtggacagtcctgaactccgtggtgtcgggggtggcaaccccacgcccaccagggaggctgtcgagccggccgcactgggggtcagggagcccaggccggtgggtgtggccgcctggtcctcgagacggcgacgggcatccagcagcgtgcgctccacccgcggattgaagccaccgcgggtctccagagcaccatactgagggtagaagccacggccgcagtaggaataggctgagtggcggctgtccccactggcattggagcacagcgactcagtggacgtccaccaggagccagggccacggggcagcgagctcaggcgggggcggcgctgcactgccacgcgtcgcagcgtgtggcccttctcgatgtcatccacgtacttgaggaagtccaggtccaggcggtagccatagggggtctccacggagtagggtggatcggggtccttggcagggaaggcaggtggggaggctgggccaggggtccctggggatgggagaaacaccaggacctttgaatcctcttgtccccattctcagggtgaagactgatgcctggggagagttggggtttatttgccgaagagatgggagcccacctggtactcaaccgcgtctgctctcagaccctccagagcagggctatgcctccccttcagactcccggcgctaggctatgtcgcctctcaaatcccccaggacagggctctatccctcggcttagactaccccctttttccggtaagactctgcctcccccttcagaccctcccagggcaggactctgcctcctccctcagacctctaattgttgggctgtgtcccaccctcaaagtccccagggcaaggtccccagccccctcaggcctccagaactgaagctccccggggcagggccctcttccctgagtcccctgacctgggaagggagcaggcacgtgcaggacctgggccatcttcttttctacagatgctccttggaagtcacttgagggactgcgagtcagactgcctgcagcaccggctgaggcttacctggggaaagagaaccacggcgccgggagttaggagtctgtagggggaggggaggagatgaggccagccccctccacagctggttcacccagccccccaacccaggtctgggacccactcatagacgcacacccagcctggctgcggaagggccccccccgaccccctcccccccgcaggtctggaacaaagaaaccaaacctcactgcctgcttgcacatctgtccaggccctggacaggctccagctgttcccatagcccagcctccacatagccctggggctggggggccccaagcccaacaggccccacccttcctgcaccccctcccctcagcccaggcccggagctggccacacggaaggatgggggttgaggcgctaaggggttggggaagaagggaacctcgtcttcctgcaaggatctgaggagacagagacgcagggggacaaagagaggcaaagcatggcgaaggggacccccagtgaccccaaagctgagagctgggtcaggcctggactgggtcggggggaaggggtagggaaagttggggaggcagctaggagtgaagcctttcccctttatggaaacaattttctctaaaaataaacagtttcactgccgggctacacagaacttcctgcccgcctaggatgcgtccgggcccaggggcgcagtagggatagagggccgggtggaggcccaggaagtcctgggggtggaggggaggaagtaagagggggcgcctggaggctgcaaaagggagggacagtcagagcctctcactaaacccccctcagccttggaggccggccagggctcttttgtccccaatataacccatctgaacttggctggtcctttctgttatctgacctccagccatcatgctgcagaggccccagcccatcccaccatcagagtaaatcctttctggcctttgagtgctggggccggcaggtaccttgggaggatgggccaggtagggcacctgctgggcatgaaggcagggctggggctccaggggcacctgagcttgtccttgttctcccgtcctgtcttgctttgtctctctccaagtctctctgtgtctctccacgtctctctgtgtctctccacgtctctgtctctctgcgtctctctccacgtctctgtccttctgcgtctctctccgtgtctctctccctgtctttccacgtctctgtcttcgcttctctgtctttcaacacctggaacacatggtcaccaattgcaggaaattccgttttccatttgcctggaggctcacccctgagcaacagaaagttgattgaaaatattttctggccaccaaagagagatggagaagcagggagcaagcgggattggagcaggattggaatagccgagcggggtgggctgggggtgggggaagtgagggtgctgctgggtaaatagtatagtaacagtaatactaacatcaactcttttttttttttttttctgagacggagttttgctcttgtcgcccaggctggagtgcaatggcgcgatctcagctcacggcaacctctgcctcccaggttcaagcgattctcctgcctcagcctcctgagtagctgggattacaggcacctgccaccacgcctagctaattctgtatttttagtagagatggtgtttctccatgttggtcaggctggtctcgaactcctgacctcaggtgatccgcccgccttggcctcccaaagtgctgggattacaggcatgagccactgcacccagcctaacatcaactcttttaattgtcatgacaattctatgagatgggcacttatcgccccgtttcacagacaggggatgcagagggtacagaaaggtacagtggcttcctcggggtcactggggccatggggaagtggctgggcctgaacatgaacctaagcctggtggatccccccactgcccaccaagccaccaccctcagactccacatcagatatctctacccgtttcccagatacggagactgaggtctgagggtactcagtcatctcaccgccctcgatgaggaccagcacgtcccgagtaaggggaagagaaaggagacgagggggtgtggtgggggagatggatgtctgtggctgagacccttctctcgccatgggacccctggggaatggggaaggggtgacaggataagacagagatggagagactggagcctataagaggggacaggtagggagcgcagggaaggggcgcgggtctccccaacccaccacccaagaccggcctgcacatcgcggaggtcggtggtggtggtgggggggggtcttcccgccccaaactcggggtggggggaggcgagaaggaccccgccccgtgcagagagggggcggggcctgtgggatcccgggctaatggcaaacagctgccgctccccacgccggcccagccgccaagcccaggcccagcccggccggacgcccggccgccttcccgccgtctggggcatggccgcggaggagggcgaggggggacagtgcggggagagggcagagccggggaggaacagaggcagaaagtgggacagagacaggggagagcgggcagaggggagccaagacaggagaaacgggcagggcacgaggaatcgatggggggtactgggaggaatcgatgggggtatggggtcaaagacgaggagggggcagggacgcggggacagacactccaagtctggaaagtttgggcacagaaggtggagttggaggcagcggctcgttgagaccagcgaggtcgtgtcccagggttggaggcggggggtagggtagtaggtgtgtgtggagggggtgcacactcgatccccgaaccagacttgaacccctacccagccccgggtcccactcgccttgcgcgctccggccgctgccttccctgggtcccgccgcccgagcgtcttcgcgcgcgccgcagcctgggcgcccggccctcggaggtggctccgcccgcaccacgccccctccggctggtcccgcccccccagccggcaccgccccctccagccgcccgggcgccccggccgcggtggggggtggggatggagagacgctggttggagactggatctcacctggacagcaggtgtgtgtgcgcgccggggtgtccggcctcgtccttccttcctccctaagtccccgaggcagggtcctcccactgccggcctcccccccaccgcctgctgtccctgggccgctgcggggggcggaacggctcggcggcgggagggggtggagctggccggggcccagctcggggagggcgcgcggggcgggcgcggcagcgggaggtcacccctcccccaggcggcccagggctggaagcggcccagcgcagtcctggcacacggtggcgtgaccgccgcgcgagaagggaggctgcagagtcctgggcgccggcgccagccagacctgcattcccatcccagacccaccaaacttttgctgctctgtgcctcagtttattcatctgtaaaatggagatgatcatgttagctacctgataggagcgttgagaagattcactgaccattaggaaggggcctaaccatcaggaaggaggcccttcgggttaaaaactctcataaatggagtggcctacttttgcagagatctttctgggagcccttttagtacacagccagccactcagcaagggcttaataaatattattaagccggcgaggtggctcacacctgtaatctcagtgcttagggaggccaaggcaagaggactgcttgaactcaggagttcgagaccagcctgggcaacatagcaagaccctgtctatgcaaaaaaatttttaagtgaaaaaaaattaggccaggcgcagtggctcatgcctgtaatcgtagcactttgggaggccaaggtgggcggattatttgagccaaggagttggagaccagctttggcaatatggtaagacgccatctctacaaaaaacaaaatacaaaaaaccacctggggccgagaaatggctcatgcctgtaatcccagcactttgggagtccgaggtgggtggatcatctgaggtcaggagttcaagaccagcctggccaacatggtgaaaccccttctctactaaaaatacaaaaactatcctggcatggtggtgcacatctgtaatcccagctactcgggaggctgaggtatgagaataacttgaatctgggaggtggaggttgccgtgagccgagattgcaccactgcactgcagcctgggtgacagagtgaaactctgtctaaaaaaaaaaaaaagaaaaagaaaaaaaagccaggcacagtggcatgtgcctataatctctgctactcaggaggcttgagccccggagtttgaggctgcagtgagctatgactgtgacactgcattccagcctgggggactgagtgagagcgtctgttaaaaacaaacaaacaaaaaccaggtattgttattgcaggtaagcatgtgacattatttgtgtgttgccttccctactagaacatcagctccacaagggcaggaatttttgcctgttgtcaccacgatgtccctggcacccagtatgttcttggtgtccccattgatgatgcagggatgtgtggatatggggcagtggactgtgagcatgtgatgagcatgtgacccagcccctagtgaccgcaccacatggcacaggttgcttataaaaaccattttaaattaaaaaagggaggaagcatcagtgcacacagatggggacacaggggcagagggcccagccccaagtacagtgtggtcaccccacagcccagtgggcaccagggcagactcccctcgcagcacagacagctgaggcccgggtgctggttcctctaggtacagctttggtccttgtgggctcagaggtctgcctttcggaaacttgctctgttcaaggagttcctggaaaaagaatgagggtgggtcagcatggccatggggcccccaactccatagacctcccagcccacatcctcttcctcctcctcctcgtcttcctccaaggatccttctgggatctctcctgtccctgatctggctgtgggattctccgattctctcttgcagtccaccacggaaggtatgaatcatccccattttacagatgtagaaactgaggctcagaaagatgaattcatgtatctgggaaatgactgctcagagcctgccctgcctttgtacatctggatgacatattcagatgcttatgcaaaattgaagccaccgcagccaggcgtggtggtggctcatgctgtaattccagcactttaggagggcaaagcggatggatcacctgagatcaggagttcgagaccagtctggccaacatggtgaaaccctgtctctactaaaaatacaaaacattagccaggcgtggtggcagatgcctgtaatcccagttactcaggaggctgaggcaggagactcgcttgaatctgggaggcggaggttgcagtgagccaagactgtgccaactgcactccagcctgggcaacagagggagagtctctcaaaaaaaaaaacaaaaaaaaaaccggaaacaaaacaaagtccaagctaccagcaaacatgttgctgtgtatgtgtacaacagcccccatcctgtacctgtcctggtctgcctctgcatcccctctctagtctctaggatgggggcactaggtcaggcacctgaggccgggtggggtgggtgccatcagctggggcaggcgctgggtaagcaggggctgcagagcctcccgcaggcggcagtagttgcgctccagctcacggtggtactccttctggtccggcccaatcagggccttatttttccgcagcgcatcctcacatctgagggccagagggtgggagatgctcagagactcgcacacgggactgaaagcaagactaggggtgggggcacccataaggcgggaccaggcctgcagaaagacccgcaataggaggtcaggttgggagagtggacttaatgggaatcgggcagatgggggagccatgcagagatcagatgggcagagagcaggcctatgcaggttaggcagacacgagacccctcctggggggttttgcgcctacttcttgcagaagtccttgaagcagagccgcaatttgttgtgatgccggaagagcttggggtcttccgggatctctgctaaaaacacctgggccacctccaggggaccctgtggggtgagagggactggtgagccagcctgcatggcacctggagtcccccgtgcggcttgcatcccccttccaccagccgtgcctggttcacggtgggccctacagagccctgaagcaccatctgtagcatcttagcatctggtgggtcctgctcggtggcaaaggccagctcccgtgtcttcttctgcatgtcctcgatggccacctccactggcgtcagcaccgtctgtggggtaaggggaggggtgtgtactcgctggggcctgaggaggtcctgatcgaagccagtcgggggcagctcagaccccgctgggagtgagaggggtccaagaacccaggcaatgaacagaatctgggggccttcctgggtctgactctgggggggtccagccttgggtctgctgggtctggtgccctggggtccaggggctttacctctggggtctccagacttccttgggtctggaggtagagatttggactggaagttggagtttggggtccccaacctggttctggggtacatgagccaatttctgggtctagcgtgtccacgcctctcctctctgggtctggaatccctgggcttctcctccctgggccttcttagatttggagtccctgtgcctcccctttgtgagtctagaatccctgggtcctcctgggtctggaggtagaggtttcagtttagagattggaatgcagggtctccatatcttctcagcccagttctggggtacctgggcctcttcctgggccacacctctcctccctgggccttcctagatctgggctccctctgcctcctctttctgggtctggaatccctgggccaccctgggtctggggtccctgcatcttgcctcccaggtctccctgggtctggtctcctcccctcccctccctggggatctggtctagggtccctgtgccacccctctctgggtctgaggtccgtgaaccaccttgggtctgggtccctgtgtctaccctcccctcccctcccagggtctgatgtcccctcacctccccacccccgccaggcccaggatccccacccacctcctcccggtggcacacacggatgcgagtcttgatgtaggggaaggcgtggtcggtgctgagcagcgtcttacgcttgtgttgctcgggcagctccccgtgtgcgcgcccatccggcgtgaacggcgtgcagaacaggaatgtgcgaagcccatagttgcggtcaaagtaggtcacccggtccttgagctcgtaggtatcaaagtacggttccacatacgtgatctggatgtaggcctgggcgcagggtcaggtgtgaggatcccacagccccagcacgcacagcccaagccctgttcctggagagaggggatctggggactttgtcatttccaagtcttcctatgtctggatgtttgggaatcccctgaggaataggttttggggtccctcagtgaaatatgatttggggtttcccagagaaagaggatttgagggtccccaggaaacagcacttggagtctctgtgaatctaagattttggggaaatggttgggggacccaccttttgtgagtcaagcttggacttgtccacagggttagagtctttgataatctcaacgacgtcgtcgccaaatctctccgtgtagaactcctggagacacagggctgactcggggccacccagggacagcccctactccagccccaaggcagccccatgccccgttccacccccaaccacaaggacgtgcctccagccggtgtgagatctctgccagcttcgtgatcgatggctccttgtacacaaactcctgctcatccaggtcaccgaagtgggcgccgtagaagcccacgcggaaatacgtcccgaacacgcgctggggctgtgagaaagggtgtggttgtccgggaggcccctgctggaggtctccctgccccagagataggtgtctcgaatatcaggatgggagtgtgaggaccccgagaacatcagggcatgggcacaggcagggggccctgagaacattggggcatggattgcaataggaagttaggactggggctgtattgtttacgggtgtgtccctaatgcccgtgggacagggtatacagcaggtacccaatacatgcatagatggctgaggagagggatggctgtctctcactctaggatggaggctctgcctcctttgttctagggcattctccttcctgtgccctgaggcccacaagaatgggtatacagtaggtaccccataaatgcttggatggctgagggaagggatggctgtgtctcactctaggacagtggctctggttcccttgttccatggcattcccctgctcctgtccccagccctaagtttggaagaaggaaccccctccctaccaccctaaaaacaccaccccatgactggaaaggaagtagaatggctggatgttcacttaccaaggccgatccggggaggatggggcagacatggtggggccagaggtgtgggggacagagagacaatgtcatgggagaggtcagaggtcagagttccctcaacccccagggtcctggttaacactgccccgtgagaatcattccgtggggggagagatcagagacgggaggggggcgggggcgaagaggacctgccctccccacccagctcccacccagcctgcctgcctgggctctgggtttctgccatctttggccagaacattctccccaaactaggagatgcctaaaaatagacctaagcagggaagaagcgggattcgggggggctggagcgggaggacacattaaccagaaatgaggagcagagagcctgggggaggctggaagctgggtacgcagggagagacagagactaagagacagtgagataccaagatagggagagccacgtgatagactggggagagatgagaaagagaccaagagaccatgagggagtcaagagtcaccccgccacccccctgcagtgaccaagctggccctggcagagggaggggtgtctctggagagctcccagctgggtgagtcacaagctgccctcgagatctggggcggggggtgggggcatttttggggaagggagggaaataatggggtgggtcccttgtggccacagccccagccccaagggccagcggccatgctcctctggtgccccctggtgttcactgatggctgctggccagtcatcacgggggtcccagaggcaggtggctgtccaccaaggctgactcacctcccagccggaactctgtggggaagagaagggtcaaggtcagcagatccctggggatgaggagtggggatgaggagtggggctgagggtggggtctggggagggggtcctgggcccacctggtgcatgatcttggtgaaggcctcctgcagtttgccgtgcaccgcggccagcttcttgtagtcacggtgggcttccaggatggggatgaggttcttgtagacctcattcaccgcctcgtagagcccgccctgagggtgaggtggggtcaggattccccaaactgtcttcctctctccactgtgctcctgtctacccatctcccttgtgagcctccgtgctcctacccaccctccatcacctcctccaggaagcccaccctgaccacccctatcccagataggggttgagcctttccactcagctcccacagagggctccatggtcttcactgctacttatcttttttgtttttttgagatagggtctcactccatcacccaggctggagtgtagtggtacaatcatagctcactgcaacctccaactcctgggctcaagagatgctcccaccctagcctcccacatagctggaactacaggtacatgccaccatgcccaaataattttattttagtttttgtagagtcagggtctcactatattgccctagttggtcttgaactcctgggctcaagtgatcctcctgccttggcctcttgattagctgggattacaggtgtgagccaccactctcccagcccttcaccacttttagcaagaatattctatggcacaggtacgatgtacatctgcacttcacccatctgtcttccctcattgatgggagaagcagtttttttttcctattcctcaaagaggaaagtgagtctcagagacagaggcattccccagggccaagacccaaacacccacccatctggccctgtgcccatgacctccatgcccaactgccttctggcatgtggtaatatgcccctcacccccagcgggtgctggcatcaagcctggctcaaaacaggcatcctgtgaggtttgctgactgtcagaaggcctgtgtccaccccctggtttcttcccctgaggcttttgtgtgtgtatggttttttttcgtaatcttttttttaatactttggggtacatgcgcagaacgtgcagttttgttacataggtatacacgtgccatggtggtttgctgcacccatcaacctgtcacctacattagatacttcttctaatgctatccctccccttaaccccacccgtgtatttttttttttgagatggctgcagtccagtggtatgatctcggctcactgcaacctctgcctcctgggttcaagcaattctcctgcctcatcctacttaatagctgggattacaggcatgtgccaccacgcccagctactttttttgcatttttagtagagacggggtttcaccatattggccaggctggtctcgaactcctgaccttgtgatctacccacctcgacctctcaaagtgccgggattacaggcgtgagccactgcacccagccatatttgtatttttagtagagatggggtttcactatattggccaggctggtctcaaactcctgacctcgtgatccgcctgcctcggcctccaaagtgctgggattacaggcatgagccactgcgcccatgcccagctaattttttgtatttttttttttttttgtagaggcagggtttctctatgttgcccaagctggtcttgaactcccgacctcaagtgatctgcccgccccggcctcccaaagtgctgggatcacaagcgtgagccaccgcacctggcccttcctctgaggccttcgtctccaagaatccagcaaagtgacaataatgaaaataatgtcactaaagggccagcaccacagaagaaatctcactggaacacctgacttcaagtgtgaccttgaatctcactgagctctcaaatgtaactgccagttccccaaaatgtgaggaactgagaaacaggtaaaatgacatcacatggacacagccagccccacacaaaccagaaaaacacacggagcaaaggccccagggctcctgcaagttaaatgtagaaaccaccaactgccctcatacaaacaagcaaactagagaagaaaaccccttttccacagtggaaaatcagttgccgggcatgctggctcacgcctgtaatcccagcactttggaaggccgaggcgagagggttgcatgagtctaggagttcaagcccagcctgggcaacatagcaagatcccatctcttaaaaaaaaaaaatgaacgaagaaaaaaaaattagttgggtgtggtggtgcgcacttatagtcccagctactcaggaggctgaggtgggaggatcacctgagccgaggacatagaggctgcagtgagccaggctgcactccagcctgggtgagagagtaagaccctgtctcagaaaaaaaaaagaaagaaagaaaaaagagacttaggatacagatcagcgacagccattgtgggcccttaatggatcctgattcaaaccaagtcaccccagaaaagatacatcagagatcatctgggacatctaaatatagagtgcaatgaaataaaggatgaccattaacttggccacgcgggataaaagttttataaaagggtctttatcaggaagggttgcacagggggtacttgtgggagtggtgggaaaatagctgggatttgtggtggtttttttttttttgttttttgtttttggagacagagtcttgctctgtctgtcaggctggagtgcagtgggcatgatctcagctcactgcaacctccgcctcccgggttcaagcgagtctcatcccgagtagctgggattacagacacctgccaccatgcccagctaatttttgtatttttagtagacatggggtttcaccatgttggccaggctattcttgaactcctgacctcgtgatccgcctgccttggcttcccaaagtgctgggattacaggagtcagccactgcgcccagcctgggatttgctttaagctggagcttctccaacttgaagatgcatgcgaatatcccaaatctttattttatttattttttgagacaaggtttcactctgtcacataggttggagtacagtggcacgattacaactcattgtagccccaacctcctgggctccagtgatcctcccgcttcaagcttcctgagtagctgggactacaggtgcatgccaccacacccagctaatttcttgtatttttttgtagagacagggtttgccatgttgcccaggctggtcttgaactcctggcctcaagtgatcctcctgcttcagcctcccaaagtgctgggattacaggcatgagccactgcacctgactcatttttattttagtatagaaagtttcaagcattgctgggtgtcccagctacttgggaggcttgggtgggaggattgagtgaggccaggagtttgagaccagcctgggcaacatagtaagactccctctctatgaaaaaattaaaaattggcagggtgtagtggcacaacacctgtaatcccatgactttgggagtttgaagcgggcagatcacttgagctcaggagttcaagaccagcctgggaaacatggcaaaaccccgtctctacaaaaaaatacaaaaaattagccggacatagtgatgtgtgcctgtagtcccagctactcaggaggccagggtgggagaatcacctgagccctggaggccgaggttgtagtgagccatgatcacgccaccgcactccagcctaggtgacagaatggaggtcctgtctcaaaaaatatcacaaagaaaaaatatatataataatttaaaaattggccaggcatggtggcatgtgcctgtgttcccagctacttgggaggctgaggtgggaggattacttgagctcaggagttcgaggctgagtgagctacaatcacaccactgtacaccagcctgggcaaaagagcaagactctgtcaaaaacaaacaaacaaaaaaacaagaaaggaaaaaagaaaagaaaggaaaattgaaagcatctctaatgtatgtaaggcttgctatatcaggcctgcatcaagggtctcatggagacataggcaaataacagggcctctgagaaacccaattctccttccttttttttttttttttttttgagacagagtctcactctgtcacctaggctggagtgcagtggcgcaattctggctcactgcaacctctgcctccctgggtcaagcgattctcctgcctcagcctcccgagtagctgggattacagccgtgcgccaccacgcccggctaatttttgtatttttagtagagacagggtttcaccatgctggccaggctggtctcgaactcctggcctcatgacctgcctgcctccgcctcccaaagtgctggggttacaggcgtgagccaccgcgcccagcctattctccttctttctaaatcccctgctggaagggtctaggaagcagatctgatggcacctccctggcccgagccccctctcctgcacccagtccccaaggcctcaccatggtgaagtagccggctgcctgttccagcaaccctaccagccccagctcagtgaagtgcttcccggagcagaagccctcctcgtcgggcgacaggatgtcgtcggagatggcggactcctctagcacgttggatgagatgttctggggtgggagaggtggcgtcagaccctggtccccactgcactcgtgccgtccgccacctgccaacccctggccactcacctggaaggaaacgcagcccacgggcaggtggcggtggtcctcgagcagggcgaggtactcagccacgagggcggccgcgtgcaccatgcactgggcggcctcggcgtggttgcccagctccgcgtgcttcccggccatgttctgcaaccaggtcagccgaaggtccggtgagccctggtagccccgggcaattctggagtccaggtgaggggggatgtgaggaggggactcacctggtcctccccacctgcctcccacttgtccattctcttcactggttacccccatgtccgccccaaggaccagccaatctcctcacctgtaccccatcccctcactcattccctcacctggccatccctcatctatctccccacctgtcttccccttcgcctattttcttacctgctggccagtcatctgtcttcacctgtctcctcccctgcctaccttacgtattcctgtagtcatcttcctcctcacttgtcctgctgtctcccactgaccagccagtctcctcacgtgtatcctactcacctgtctatcccctcacctgtccaccccctcacctgtccgtcccttcacttgtctatcccctcacctgtccaccctctcacctgtccatcccttcacctgtctatcccctcacctgtccaccccctcacctgtccatcccttcacttgtctatcccctcacctgtccaccctctcacctgtccatcccttcacctgtctatcccctcacctgtccagcccctcacctgtccatcccttcacttgtctatcccctcacctgtccatcccttcacctgtctatcccctcacctgtccaccccctcacctgtccaccccctcactgtccaccctctcacctgtccatcccttcacttgtctatcccctcacctgcccaccctctcacctgtccaccccctcacctgtccatcccttcacctgtctatcccctcacctgtccaccccctcacctgtccaccccctcaactgtccaccttctcacctgtctatccccttacctgtccaccctctcacctgcccgccctcacctgtccaccctctcacctgcccatccctcacctgcccaccttctcacctgtccaccgtctcacctgtccaccctctcacctgtccatcccttcacttgtctatcccctcacctgcccaccttctcacctgtccacctctcacctgtctatccccttacctgtccactctctcacctgtccacccctcacctgcccaccctctcacctgtccatcccttcagctgtttgtcccctcatctgtccacccctcacctgtccatcccctcactgtctcttcacctgtccacccctcacctgttcatcccctcactgtctcttcacctgtccacccctcacctgttcatctcacttggccatcccttcacctgtctccttatctgtccacctcctcacttgttcatcttctcatctggccatctcttcaccagtccatcccttcacctgtctccttgcctgttcaccccttcacctgtctccttgcctgttcaccccttcacctgtccaccccctcacctgtctatcccctcacctgtccaccccctcacctgtccatcccttcacctgcccatccccttacctgtccaccccctcacctgtgcatcccctcacctgtccatcccttcacctgtccatcccttcacctgtctgtcccctcacctgttcaccctctcacctgtccattccttcgcctgtctatcccctcatctgtccacccctttacctatctacccctcacctgtccatcctttcactgtctcttcacctgtccaccccctcacctgttcacctcacctggccatcccttcagctgtctccttatctgtccacctcctcacctgttcatcttctcatctggccatctcttcaccagtccatcccttcacctgtctcctcacctgttcacctcctgacttctttacctcctgacctgtccatcccctcacctgtctatcctgtcacctgtgtcctcacatgtccaccccctcacttgtgtcctcacctgtccatttcttcacccactcacctgcctgtccaacccttttcctgtcttcccacttacctgtctcctcacccatccatcctactcacctgtctcctcacctatgcagcatctccccgcttcctctattcacctgtctcctcgcttatccaacccctcacctgtctatcccttcacccccctgccccaccttttcatttctcacttgaccctccgctcttgagttgactctacctgtggaaacttgagtcacctgaactcactatttccccttccttgtgcaccatctcacttgtctatccacctatccctcccatatgccccacctcccccatctccatcacccgtccgcctctcctacactcctcaatgggtctactctctggatctcatttcccttcacctgtaagcacctcacctgtccccctcacctgtcctggctctcatctgtcatcctcatcagtacattctcctggcatcctctttacctgtttgctcatctgttctctccttacttgtgccctcatgtctgctcacctgtccccctcacctgtctgctcccctatcccccttacctgtctgctcccctgtccccctcacctgtctgctcagctgtctgctcacctgtccccctcacctgtctgctcagctgtctgctcacctgtccccctcacttgcctctgttagggactgtatgctcccctgctccctcctcacctccttagacatctactctcatccctgttctccctgcacctgttggggcgtgggcgtggctgaaggtgccagctggcccacctcacctgtacatgaggtcgatgagcatctcagggtcctcctggtgttccttcatcttcaccgtgtccgtcaggatcatgtgcaggttgaacatcaggtcctggacctggagccggggaacgtccaggggccaatgagagcattaggaagtgaagggagccaaggtggtggggttgggagttatatgaaggggaggcggggcggggacccagcaggtgtcacctgctctgcgaaggtgctgtcccgcagccccatgtcctcctcagcataggtgaggatggttttgagtgaacgtcgcaggtgctcttcactgaagttctgcgtcgtccccaccagggacgagagagacatggtgacctgcatcttcacacgggcaaagttctgcagggacaggggcgggagggtggagccgggagtctcagaccccagaccccacatcagagtctgctcaacctgccgacatggcccttgcgttctttattttttttgagatgggggtctcactctgtcgcccaggctggagtgcagtggcatgatctcagctcactgcaacctccatctcccgagttcaggcaattctcctgcctcagcctcccgagtagctgggactgcaggcatatgccaccacgccctactaatttttgtatttttggtagagacagggtttcactgtgttggctatgctggtctcgaactcctgaactcaagtgattcacctgcctaggcctcccaaaatgctgggattacaggtgtgagccactgcgcccagcattttttcttttctttctttctttctttttttttttttttgagactgagtgtcactttatcacttaggctagaatgcagtggtgcaatcttggctcactgcaacctccgcctctcaggttcaagcgattctcgtgtctcagccttccaagtagctgggattacaggcacccgccaccatgcccagctaatttttgtatttttagtagagatgcggggttccatcatgttggctgggctggtctcgaactcctgacttcaagtgatccacctgcctcagcttcccaaagtgctgagattacaggcatgagccactgtgcctggcccttttttttttttttttttttttattgagacaaggtctcactcttgctcaggctggagtgcagtggcacagtcgtggcccactgcagcctcaaactcctggcctcaagtgatcctctcacctcagcctcccaaagtgctgggattacaggaatgagccacggcacctgacccccaattgcattctgagccctcctcctgctcattatgctcaatgactgtctccccctccctcactccctgtatggttgagaccccactggccaccctgaccagagccatgtgtggaccatgcctcctagcccccactcacgtggccgatctcgaagttctgtcgcatgagcaggtacagcgaggcgctggcgtgcgtgcggatggtgctgatgcggctgccacagtgtcgtaggagcctcaggcacaggtcggcacacagctccgtgtcctcctcgaacagcagctccgggaactgcccccaaggacccagacagacactgtccagcccctccccgttctggctcagaaggggactggcccaaatgaggactgcttgggcaggggtttgtgttctgtcctctttggccaagtaccactgggttcggagtcagacctgggtttaagccccttgctgtgtgaccccaggtgagtgacttggccactctgattctgccttccttccactgtaaactgtggcaaagcagtcagctccatggagttgcagagcacacagtaagtgctcaatgaatgagctccttttttttttttttttttgagacggagttttgctcttgtctcccaggctggagtgcagtggcacaatcacagctcactgcagctttgaactcccaggctcaagccatcctcctgcctcagcctccctagtagctccctagtagctgggatctcaggtggtgtgtgccatcctctctggctaacattttttttttttttttttgagacaggctctcactgtgttgcccaggctggagtccagtggcacgatcatggctcactgtaggcttgacctcccgggctcaagtgatcctcagccttccgagtagctaggaccacaggtgcatgccaccacactcagtttatttttttgtagaaatggggtctcaccgtgttgcccaggctggtctcgaactcctaggctcacatgatcttcctgcctcagcctcccaaagtgctgggattacaggtgtgagccaccgtgcctagtcctagctaatttttaatttttttgtagagacaggggcctcactatgttgcccaggttggtctcaaactcctggcctcaagcgatcctcccacctcagcctcccaaagtgctgggattagaggcatgagccactgtgctcagcctagagctgctactgtttttctaagaatcatggttgttgagtggtgctcaccttggacacaagggccctctgggtggccaggccatgctgcaagaagagggcactctgggcactgcccaggctgtacagcacaaccttcagcactgcccccaagacgctctcccgggcttctgaaagcatcaccgtctggagggaagggggtcagaaatccaggtgttagagcctagggtggttatggggaaagggaaggagagggattatggagtcagagaccacagggcactgcagttgggctcagagcacaaggcagatgctggatcaagccctacctgcacgatgatctccagtgtgtccagaaccactaggcttgcctcggttgccaggttcccttccaccaaggcctcgtgttccatttcatccttggtcctggaaggggaaaggaggtcttgggggcccactcggggtgagatcctactccatggctgagctctctccttcccctggcagcccagggggcactggctccctggaagctgttctgttttttgtttttgttttttttgttttctgagacagggtcttgctctgttgcccaggctggagtgcagtggtgtgatcaccagctcactgcagcctcaacctcccaggctcaagtcattctcccacctcagactcatgagtggctgggaccacaggcacatgccaccatgcctggctaattttttttttttttttttgagatggagtctcgctctgtcacccaggctggagtgcagtggcgcgatctcggctcactgtaagctccgcctcccgggttcacaccattctcctgcctcagcctcgctagtagctgggactacaggcacctgccaccacacctggcttattttttatatattttttagtagagacaaggtttcaccgttagccaggatggtctcgatctcctgatcttgtgatccgcctgcctcggcctcccaaagtgctgggattacaggcatgagccactgcgcccggcccatgcccggctaatttttaaatttttggtagagagggtcttactatgttgcccaggctggtctcgaactcctggactcaagcaatcctcctgcctcggcccaaactgttctgaactcagcagacaccctcctgcccacacctacttgtccacgcggtctgaggtttgcttccagtgtgtgacgctcttccgccagcgcacattctccggattcccaaacgggctcctctctgagacgcgtgggtgcacgatcacagatgcgtaaaaacacagggcacacgtgaacatcaggagaaatgcacaggcatgaagatattcaggtgggctgacccatgagggcactgggtggagcagaagcctgccgggtggacgcacaggggcaaacacgagtgacagatggggacgcacaggcgcatgtgtacggtgatgatttgtggacttctctccaggaaaagtgaggcagaaagtaagctagggatggcccccttcatggggtccccttgacacaaggtgggagcagctggtgggatggggacacgtgggtatgtcaccctcttaccacgacttcgccgaaccatttcttgtcgagctccgatggtacccagaatggcttcctctagccgcgccttcatatccagagattttttgaatgtgaggctgttgatgcgttcaaaggcctttttcccctgggggtgcagagaactggggttccaggctgactctgctcttttcggggggacctgggctggccccatccctttctttgtgctctttctcacctccgggcccctgtgcttaaagacagattgcctttttcctctaaattcttagcacttaccaaaaaaaaaattttttttttttcttgaaacagagtctctctcattctgtcgcccagggtgaagagcagtggcatgatcttggctcattgcaacctccacctcctgggctcaggcaatccacctcagccacttccatagctgggactaccagcatgtgccaccatgctcaggtaatttttgtatttttcgtagagatggggttttaccatgctgcccaggctggtctcaaactcgtgggctcaagcagtttgcctgccttagcctcctcaagtgctgggattacaggcgtgagccaccgcaccaggccctgttttaaaaaaatttcttttcttcttttttttttttgagatggagtctcactctgttgcccaggctggtgtgcagtggcacaatctcagctcactgcaacctccacctcccgggttcaagtgattctcctgtctcagcctcccaagtagctgggactacaggtgcgcgccaccacacccagctattattttgtatttttagtagagacggggtttcagtatgttggccagactgctcttgaactcctgacctcaggcgatccacctgcctcggcctcccaaagtgctgggattacaggtgtgagccactgcacccggcctccaccttccaaattctattcacaaaggcacttctgactttattccttgcctcagcacagaaacagtccacccctttcctctcagtcccacagagtcctctgcacaaagacagtccaccccttcccactcagcccgcagcacgctgggtccctgggtacatccttagcctgcctcctccatcatctcctgcccacgccctcaaaccttgtactcaaaggcagctaggcaaaggtacagcaaatccaacagacgtcccagctgggggagtgtcaggtcagtggcccagcgctgcaggagcgccggctcggtgtttttcagcacccacagcacacacgccagcaaggtccggcttgactcagcagagagggcacagcctgcgcgagaagcctggggccagagaggaatcaaagtcaatttccattttctccatgtgagatgaatcctggccaatctgtatcttgatacatgacttctctcattcaaagtggatgatgtctatggggacaagcctccctactcaccgttggtggcccctgggagatgctggcccgggagccaggggctagggggccaccagcaatggccatggccacagaggggttgatggtacccgcaatgtccccttcgccttctgtgtctgagtcaagcattgaggccagtcttgaccgctgacctgggccctctggcagggaaagacagagggaaagaaagataaacccttggtaagtgctgtccctgtctcaaatttcagaagtcttccctcatggccaggcacagtggctcacgcctgtaataccagcactttgggaggcagaggcgggtggatcacctgaggtcaggagttcgagaccagcctggccaacgtggcaaaatcccatctctactaaaattacaaaaaattagctgggtgtggtggcgggcgcctgtaatcccagctactcgggaggctgtggcacgagaatctcttgaacctgggaggtggaggttacagtgagccgagatcgcgccactgcactccagcctgggcaacagagcgacactctgtctcaaaaaaaaaaaaaaaaagaagtcttccctcacaacagtccccaagagtgggtttctggttgtctgctcctggaattcacttattttacttattttatttattattgttttttgagacggagtcttgctctgttgccccggctggagtacagtggcctgatctcagctcactgcaacctccgccccccaggttcaagcaattctcctgcctcagcttccggagtagctgtgattacaggcacccgccaccacacccggctaatttttgtatttttagtagagacggggtttcaccatgttggccaggctagtctcaaactcctgaccttgtgatctgcccgtctcagccttccaaagtgctgggactataggcatgagccatggcgcctggcctattttatttttttttggatacagtcttgctttgtcacataagctggagtacagtggcgccatcttggcccactgcgacctctgcctcccgggttcaagcaattctcgtgcctcagcctcccgagtagctggtattacaggtgcgcgccaccgtgcatggctaatttttgtatttttagtagagatggggttttaccacattggccagactggtttcaaactcctgacctcgaatgatctgcccgcctcggcctcccaaagtattaggattacaggcgtgagccactgcacttggccaattttattttatttttttcagacaggatctcactctgtcacccaggctggagtgcagtggcacaatcttggcttactgcagcctcaacctcctgaactcaagtgatcctcccacctcagcctcctgagtagttggaactgcaggtgcgtgctgccacgcccagctaatttttgtagtttttgcagagacgtggtctcactaggttgtctaggctggtcctcaactcctggactcaagtgatccgcccaccttggactcccaaagtgctgggattacaggtatgagccactgcacctggccttgatgttattactatagcatcaatcagcacttatatggtatctcctatgtgccagatgctgttctaaggactttaaaaatattcactctttcaaatcataggagctcaagaaaaaaaaaaaatcacttttttttttttttttttttttgaggcggagtctcactctgttgcccaggctggagtgcagtagaatgatcctggctcaccacaacctccgcctcccaggttctagtgattctcctgcctcagcctcccaagtagctgggactgcaggtgcgtgccaccatgcctggctaatttttgtatttttagtagagatggggtttcactatgttggccaggctggtcttgaactcctgacctcatgatctgcccgcctcggcctcccaaagtgctgagattacaggcatgagccactgcgcccggtttttttttttttttttttttttttttgagatggagtcttgctctgttgcctaggctggagtgcagtgacgcgatctcggctcactgcaacctctgcctcccgggttcaagtgattctcctgcctcagcatcctaagtagctgggattacaggcatgcagcatcatgcctgcctaatttttttttttgtatttttagtagagactgggtttcaccatgttggtcaggctggtctcaaactcctgaccttgtgatccgcccacctcagcctcccaaagtgctgggactacaggcatgagccactgcacccggcttaaaaaaatcactgttaatcggctgggcgtggtggctcacgcctgtaatcccagcactttgtgatgtcgaggcgggaggatcacaaggtcaggagatcgagaccatcctggttaatacagtgaaacctgtctctcctaaaaatacaaaaaaaactagtcaggcgtggtgacgggcgcctgtagtcccagctactcgggaggctgaagcaggagaatggtgtcaacccaggaggcagagcttgcagtgagccgagatagcgccactgcactccagcctgggcaagagcgagactctgtctcaaaaaaaaaaaaaaaatttactcttaatcatcaaaacaaccatatggagataagtactttcattagtcccactttatggacgaagaaattgaggtacagtgaggttaagttacttgcccagggtcacatagcaggtaaatggaagagctacaatttttttgttttgttttttgttttttttttgagacagagttttgctcttgttgcccaggctggagtgcaatggcacaatctcggctcactgcgacctccatctcccaggttcaagcgatactcctgcctcagcctcccaagtagcttggattaccggtgcccaccaccacgtcgagctaatgtttgtatttttgggacagacagggttttaccatgttgtccaggctggtctcgatctcctgacctcaggtgatccacctgcctcggcctcccaaagtgctgggattacaggtatgaaccacatgtgcccagcccaaaagctacaattttatcctcaacagtctggttcccaagtctatgctcttaaaaaggtaacccccattctctcccctaaaaagtctcaacagagggaggagttgtcaacaaatatatagcagatcttgccctagagtctcctgaaacaaaaggtagactgagtgtaaataaagctctagcccagtccagcctagctcaattcctgattggactgaggtgatcagcctgttatcctatctgcctaagagagggaaaggacacttctcactgggcaaagatgacattgcttcatccctatggttcttttttatacaatgtccagaatataataaaaaactacaaggcaagggatgaggcaggaaaatgtggtggataagagagaaaaagagacaacagaagcagacacatggatgatcaaatctggaagtcagcaaacagaaacttttaaagttagaagaaaagatgagcaaaaatgagacaaaagatggagaatttcaacagggaattgggatctacaaaaaaatcacatggatattttacactggaaaaaaatatataatatctgaattttttttttttttttttttgagacggagtctcgctctgtcgcccaggctggagtgcagtggtgcgatctcagctcactgcaagctccgcctcccgtgttcatgccattctcctgcctcagcctcccgagtagctgggactacaggcacccaccaccatgcccagctaattttttgtatttttagtagagacggggtttcaccatgttagccaggatggtctcgatctcctgacctcgtgatctgcctgcctcagcctcctgcagtgctgggattacaggcatgagccactgcgcccggcctaatatctgaaattaagaactcaacggatggggtcaacaggacactgggcacaacagaagacataagtggtgaactcatagacaagtgaacaaaaaacttcccagttggattacagagaggaaagaatggaaaaaacagaacaggacataacagatgtgatcaaaaggcctaatatatgtgtaattggagtcccaggagtgaagagtgaaaatgaggcagaaaaaaattcaagtgagaatggctaagaatttccccaaactgatgaaaggcatccacccacaaatcccaattttgtacttccaaccactgttataccacccccctcaacaatgcctataaatgtttgttgaaaatgagtgaatgaatgtactccaatcattttctcacttggatgttccctactttttgctcttcttagaaaataataaatggtacaataatatctcccatctattgtaggctgacaatatctcagtactacagccccccacattttcacataaccttatgaagtagttggtgttgttactgtctccattacaggggagaaacctgaggctcagagatgttatgacttaagtagtctgtcctagcactttaacctgctctgctaatcctaatgtctatactcataccagtgactgtgttctcccacctttactatcctgtgccttctgtgaccaagtccctggatcatgtgaccccatcttcccctggcccactgaccagcaaagtcatgcagccgtggcaaggtatcccgtgcaatcgatagcagtggcaggtacagctcggccacacgagccttcacagtggcctcggcgtagcgggggtcagtgtcatggccacatagcaggctgtgcacagcactgatggccttcttgtgcaacaggaatgccctatggggtaatgaggtgctcaggacagggtggacatggctcctggactgtcccacctgtcctggggctagacaggagctctgctcacccttcagcctcaggttcgagggccagtgccagctccgtcagcaggagcccagctaggaagtgctgctgccggaatggtccactcagttcgaacatgctggtcaccttggggtccggggcttggctggagaaggtggagctctgcagagtgggggaaaaatgggggatgccagcggtcaagggtcagaggtggcaggtcaccattaaagccatcttggaggtgacagaaatcatggtgccaatagccacagatgaaagactgatgttaagtcatctggaggtgacagtgggcatgggtttcaaggccagaagtgaggggctgacgttaacccatctgtgatgtaacagggcacggagtcaaaagtcagaggactgagaaatagcagatggaacactgggctgggagttaggatttaggggagagaaatcagaggttagtccttctgggaaattgctgagaatggcaagagaggtgaagggtcagaagtcaaaagtcaaacataagggattagttcacctaggcagtggtccaccgtgaaagggacagagatgagggaaccataggagatggactgaaggtgagaggttgtaggtcaaagagaggaggcagaagtgaaggcagcccacctgggaggtggtggaggacacagagggggagggcgaggctggaggtgacagggggcagcaggggaggttgagggtcacgtagtgctcgtggctgcacaggatgcgggtgaattccatgcgcagggtcagcagggctgctggattaggggacgactggagccgcgtggccacctgcaggagaggggtggccatcagtgatgtcaacattgctccgccttccatccatgccatgcccaccctgcccacgcccactcctacctgcttgtagtgggcccggaccaggctgaagacaaagccccggtccaccagggacagaaggtcactgaggaagaaagccaggctggcgttgaggtgctcggccagctccacatcctggggacacaggtgcctgtcaacccacacacccaaacctcagccccgacaggggcttggctctcaccaagatcatctgccacccctaggagctgtatcactgccccaaagcctttgtctgtgggctgtggtgactctgggacttcctggttgtcctcctcaggctgccttcccctcccatgctccttaagacaccaaggcagatatgggctaactccctgcaagatcctctcgctctctctgtccagagttcagagctggggagagactatatttcccagcctcccttccagttgaaccacatgaccaattctggccaatgggatttgaggggaaagtgaggtggccacttatatggcagaagcaggtgggtgccggggaactgccagggccaggcccacacagtgatgcctctacaacctacttaatactcagaaataagctatggttatttaaatcacttgtgactgtgttgaagcgaattagcctctgccctaactgatcgactcttaccatcatttatttttattttaattttaattaattaatttattttttgagatggagtcttgctctgtcactaaggctggagtacagtggcacaatctcggctcactgcaacttctgtctcccaggttcaagcgattcttctgcctcagcttccccagtagcttggattacagacacccaccaccacgcctagctaatttttttatttttagtagagatggggttttgccatattggtcaggctggtctcgaactcctgacctcaggtgatctgcttcccttggcttcccaaagtgctgggattacaggcgtgagataccgcacccggcctctcagcaccatttaatgtgagctttactgagcatctactctgtgccaatccctgtgaatgaggcagatgccatccctgctgcgggtccaactcaatccagtgtgtgtgtgtggggcgggggcagggagacacaaaataaacaagaatttcagatagttctatgtgcttcaaagacaatattaaattggtgcaaaagtaattgcagttttgcaattactttcaatggcaaaaactgtaattacttttctttctttctttctttctttcttttttttttttttgagacggagtcttgctctgtcgcccaggctatagtgcaatggcgcgatctcggctcactgcaacctctgcctcctgggttcaagcgattctcctgcctcagccttctgagtagctgggattacaggtgcgcaccaccacacctggctaacttctgtgtttttagtagagacagggtttcaccatgttggtaaggctggtctcaaactcctgacctcaggtgatccgccctcctcggcctcctaaagtgttgggattacaggcgtgagccaccatgcccagcctataattacttgtcaccaaccttaacagacgggggtgacattttcagagatactgaaggataccaaagagccatggggagaatggcatcctgggttaagggaacagtcagtgcaaaggccctgaggcaggatgtgcctagcaagtccggggaacagtgaggtggctgatgtggccctgaggcccagctggtattcgttctgccctcatactctcttgagccactctgaggcctcacaagttagcctcagtggccctcaaatccctgcaacccggccaggcatggtggctcctgcctgtaatcctagcactttaggaggctgaggtgggtggatcacagggtcaggagtttgagatcagcctggccaatatggtgaaaccccatctctactaaaaatacaaaaaattagccaggggtggtggtgggcgcctatagtcccagctacttgggaggctgagccaggagaatcgcttgaacccaggaggaggaggttgcagtgagctgagattgcgccactgcactcccgcctgggcgacagaatgagactccgtctcaaaaaaaaaaaaaaattagccgggcatggtggcgcacccctgtagtcccagctactcaggaggctgaggcaggagaattgcttgaacctgggaggcggaggttgcggtgagccgagatcgtgccattgcactccagcctcggggacagagcaagactccatctcaaaaaaaaaagtggattatcacaggcattgttcttctctggatctctttcttggggtagtttcctcaccatctggatcagcccctgggaatgtcagtctttgggaaggctccagtgagacaaggccagaacctttgagaccagcttggaggtcacatgtgattgtgtaagggttggcctgggccagaacgccatttcaaaaatctggaaagttcccagcaaatccagaggtcccatttctccttagacaccaggccatctcctggcatgggaacataggaagaccccatctctacacacacacacacacacaaaaataggtgggtatggtagcacgcacctgtagccccagctactctggaggctgaggtgggaggattgctttagcccaggagtttgaggctacagtgagccatgatcacaccaccacactctagtctggacaacagagcaagaccgtgtctcaaacaaaaacaaataaaaaaacaaaaacaaaaccacacacaaaaaaaccccagtcaatctggccaggcatggttcacgcttgtaatcccggcactttgggaagccaaagtgggagaagcccttgagctcaggagttggagaccagtctgggcaacatagtgagaccctgactctactaaaaaaaaaaaaaaaaaaaaaaaaaattgccaagtatgttggcttgtgcctctggtcacagctacttgggaggctgaggagagaggatcccttgagcccaggaggtcaaggctgccgtgaactatgatcgcaccactgcgctccagcctgggcaacacagcaagaccctatctccaaacaaaaacaaaaacagccaatctggacatagctgagccacattcctgcagggtttctgttggctggattgagtgatggtcacccctgttaggtgggacatctgccctctgctccaccataagccccactttcccagctgaaactggtattgacagtgaggggtctggagctggtggctcagattcaaaagcctcattctgccccttctcagtcgtgtggtacaaggttaagctaccactcattcgatgcctcagtttccccatcagtaaaatggagataacaataatactaacttcatgggttgttgtgagaatttaatgatacgatccaaggccgggcgcggtggctcacgcctgtaatcccagcactttgggagggcaaggcgggcagatcacctgaggttaggagttccagaccagccaggccaacatggagaaacactgtctctactgaaaatacaaaattagctgggcgtggtagtgcatgcctgtaatcccagctacttgggaggctgaggcaggagaatcgcttgaacctgggaggcggaggttgtggtgagccaagattgcgccatcgcactccagcctggacaacaagagtgaaactctgtctcagaaaaaaaacaacaacaaaaaaatgatacgatccacataaaatgcttagatatacagtaagtgctcaataaatgctccatattattactattatgattagtattgcctgcctagcccctgagggcattggaattggtaatccagggcctgaacaagtccactgtcagggtctcagaacatcaacatccatttattgagcacttgctgtatactctgactgtgctaagggttaatggatctgccttgtcacttccccgctcccaccaaccctcatttccttcctcattcactacaatctagccatccttactgctctactgttagcccaagcatggtcttgcctcagggcctttgcacctgctattccccctgcctggaatgctctttccccagacattgcatggaatgatcccttactttcttcaagtctccccttaaaagctacacaagggtaaggatttgggtctgttttgtttattgttatattgctacacccagcacagggctgtgcacgttacaggcacttaagaaacagacaatgaatgaacggatccacccagcaaagtggattcctggtcttacggccaggagacactgggcaggattggcgcccccacctggctggctctatgtcctccctcaggtttcttcccacattgagaccctgcatctctcaccttgtggacacgggtgatgacctccaggcccacagagcccaccaaggcagtgatgtcgtccaggaagcgtccggggaagcgcagcttgcggggtgtgtctagtcgctggccaagcagcaggtgcagcgccatactcttcacctgggggtggggtgagagggctgtgggtgggatttgaagggctgtgggtaggacttgaagggctgtgggtggggcttgaagggctgtgggtggggcttgaaggactgtgggtggggcttgaagggctgtgggtggaggaggcttgacaggaggggcggggctttattagcaatggaggtgggctgaaggtaggtttgagccctgtagctgcaggtagaagctggggcctgagggatgtgggtggggcttgtgacctatggatggggcttaagaaagccgtgggcagatcctgtgagcatcccaggcaaagtgtagagagtgggaaggctgagaggatgtgggaggggcttatgcgggtctccccagggcaagtcagaggtgggacaaagggtggggcttgaggcactggatttgaagggagctttattggaggcccagaggggatgcagccagcaggccctgggaaggaggcttcaaataacctattgaagagttttagggatgtgtcttaccttgatcagaaagctttccctctttttttttttttttttttgagatggagtcttgccgtcacccaggctggtgtgcagtggcataatcttgactcactgcaacctctgcctactgggttcaagcgattctcctgcctcagtctcccatgtagctgagattacaggcacgcactactacgcccggctaacttttgtatttttagtagagatggggtttcaccatgttggccaggctggtctcaaactcctgacctcaagtgatccacccgcctcggcctcccaaagtgctgggattacaggcgtgagccactgtgcctgaccacagctttctctctctatccaggaatatctcctgcaggatgcaggtctcctgtctaggtgagggtctcttaatggtttctctccttaaagagtctcatggggaagggtggctctctctaaaggtggtttcaggtacagtctctccagggagacaccaccttaagtgcctctcacctccctaggttgtgggggggggtctcttggggccatttctcaaatatctcaggtgcaatttcagggggcttctctctttttttttttttttttgagacagagtctcgctctgtcgcccaggctggagtgcagtggcacgatctcggctcactgcaagctcctcctcctgggtgcacgccattcttctgcctcagcctcccgagtatctgggactacaggcgcctgccaccactcctggctaatttttttttgtatttttagtagagacggggtttcaccgtgttagccaggatggtctcgatctcctgacctcgtgatccgcccgcctcggcctcccaaagtgttgggattacaggtgtgagccactatgcctggccagggggcttctctctttaaaaaaggaaggggctccactgggggtctcttgccaccaggcagggaggagggggtctcaccatgagctggaagaagaaccaggcgtgctggaggatggcctcgcgtacggcactgctgctgaccacccactgcagagccagctcctcgtgaagcagctggggacagaggcaggggtcacagagtgcgaggtgccaccccttcccgtaccccctctggagacatgccaggggaagatgcagctggagggctcggggttagtgcagcaggagccaggcaggaggagggggacaagaggagtggaagtgccctttccctgggctcgccagacccccctggactctggatgggggaggagcactggacccctttgctggggaccaggacaaaaatagcgtcatccgcacctccccccactaccttctgcacagtgggtctcagctgggtggctggtggggccgaggaggaaccctcgaggtaggaggaggctcggctagagttgcagtcgatggcctatgatgggatgtgatggcgaggagaaggttagtgtggatgaggtgaaggggtatgtggttggaggaaagacgtgttcacacagacagggatggggaaaagaggtaggttagtgtgaatatagagagagaaatgcttccacatggatggaccagggccatggatgccaatggggacaggcaagaaagagagatgggccggcgtgggttgggaggggaggctggttggaatggccagggtgctgtgggagtagacggggcagtggaggcagggacaaataaaagagtcgctggagagagctgggtgagtcaagatcaaggtgtgtgggtatgggagaagaacgtgaggctgggcggggtggctcaatacctgttatcccagcactttgggaggctggggcaggaagactgctcaaacccaggagtttaagatcagcctgggcaacatagtcagacattgactctactaagacaaaaacaaacaaacaaacaaaaatatatatatatggctgggcctggtggcgtgtgcctgtagtcccagctgctcaggaggccaaagcaggaggattgcttgaccctgggacttggaggttgcggtgagctgtgatggtaccactgcactctagcttgggtgacagagcaagactccatctcaaaaaaaaaaaaaaaaaaaaaaggaggatgctgtaatcctagcactttgggaggccgaggcaggtagatcacgaggtcaggagatcgagaccatcctagtcaacatggtgaatggtgaaaccccgtctctactaaaaatacaaaaattagctgggcgtggtggcaggcacctgtaattccagctacttgggaggctgaggcaggagaatcgcttgaacctgggaggcagagcctgcagtgagccgagattgcaccattgcactccagcctgagtgataagagcgagactccgtctcaaaaaaaaaagaacgtgatggaggaggtgagaataacaatgaaaacacagtacgccagtgaccagtgacagcagtgcaaccacaacaggcaggaggagtgtggatggagtgggaccgagaacacacgaaggctgggaatgggtacatggtgtgtggggtgaaggcagaggagatgaaatcagtgtagacagcaagaatgtgtgtggccagagaaggtgagggtgagtgtagacgaggtgtagagtgtgaccgagtcagtgagtctagaggacagagaggaggatgcagaggtggaggagggtgagtgtggacagaggaggttaaacacaagatggggaaggaggagaaagacaaggcaggaagataaggacagaggaggtgagatgttggtgaggtgccaggaatagcagagagagcccaaggttccaggcctggccctgcccaagcctggcttgggcctcagtatccccatctgtgaaatgggtataggcagaggagttcaagctccactctcgcttcctccttcgctggttagggggtgaggctgctcgcaggaacaggaggtctgatgacagagacgacccaaccctgggacctactctgacacttgagggctctctagctaccccagtcccagccataccctggcaactcactgtgcaccgtgagggccttccattgaaaaggcccagcctcagtgtcacccagatttccagattcccagcaatccaaggaaatgactgcccaaaggccccccctgcttgttctgctaggagtcccctgggcctgtcatagggtacaggttaccttggtgatgggcacagagctggaataggccctagggccaagtgtgtaaggaagcaagccctgtggcctcctctctgtgcgtacagtcctctgaccttggtcccaatatttgtacatgcctttccctcttcctgaacacccacacccacccacccttccctagctgactctatcttacccttcgggtcccagcaaaagatgtcactcccctggagaagcccccaagaccacccagagggaagctggtattcggttgctacttgcttcctttccacgctgtgtgatcatatacttatgcatttgtttgatccgtgtctatttccccaactagctggaagctcagggtcaaggccagaccaagaatctatcatcccaacaaaatcccactgcagtgccctcagccctaactcaagcacaggctcaggactgctgggggagcactatattttgagtccaaactgcatccgaaaatttggagtgttatctccattttacaaatgaagaaactgaggctcaggaagatgcatccaattgctcagagcatggggtgagctcatagcagagctaggacttgaacccaggtctgtttggaggcaaagcgtccccctacaccaggtacctggaaagaggcagggtaaggggagctctttgtctaaaatgggataggggagccgagaggttccattccagccctttgagagtcccatcatcaggggtggattaaagggaggtgaacaggccatgcagggcagtgaggttatgggtgactggatttgcacttcgtttgcatgcgatttgcatattacccctgtgccttctgtctccatctgagactgtggcctatgtggcagcaaaaagccagttaggatgacccagtgatacctaaacacagacttcacagccccaaacaaaggcaggagaggggtctgccacctccttcaggcagcccccctaggttagtcagatgcagccaggaaggtgggaggagctcatgctgaggtggtgtcacatgagtgcagggacaggtaggaagggcacctgtctggggtcggccccacaataagggggcgcccgccgcagcacagccttactgcctcctggagcataagcggaattcacccaggagtgtgagcgatcgatgccctggagatacacggagaagtggtagcatccccagtggagggcagggaaagcagcatgaaataccaagcgtggacatggttctggaccatacatgtgcccacatgtgcacctacacacaatcctgaaaaatgtgcacgtgtatataggtccattgggtgcatgcctttacataacttgtgtatgtgggtccacaggtgcatgcatacacacccctgtaagtctgtgcatggggtgcatgtgtatacacacccgtacacatatatgcatcaggtgaatgtgtatacagacccaggtacatacaggcacaggatgactgtgtatatgcacctgtgtaagtatatgcatggggtgaatgtgtatacgcacccgtgtctgtatatgcatggggtgaatatgtatacacacttgtgtccacacatgcatggggtgaacacgtatacgtgcccatgtacatatatgcatagggtgaatgtgcctatgtacctgtgtaggtatatgcatgtgggggtgaatgtgtatatgcacccatgtacatatatgcatggggtgaatgtgtatatgcacctgtgtatgtatatgcatggggggtgaatgtgtatatgcacctgtgtaggtatatgcatgaggtgaatgtgtatatgcacctgctacactaggtacatattgctctttgttcagccacgccaagctccgccacccatcctcgggtcagtcacggagtagagctcaacacaaagtctgatccataccccacaacctgtgacagcccagcccaactctgctgcccagagtgacgccttcattcacgttgtcgtctctgttgtttcccatgcttcatcaacagattcttcgcccacacacgtggcaaccacaaccactgaggctggagattccagggcccccgttgccctaccttgctggccaggatgcgggaaacctcgtcatccacagagccaggggccacggcgaggtcagggttgctgctgctgatgctcttggaacgcgccaggtagaggcttgcggggcgaccagagccacgggccagtgtggcagcctgcactgtcactggaggggcccctgaggatggagtgaatagggtcaaccacccacccacctgatgtgatgcctcccagtcccttcctactcagctaatctctgcaaaatcactttccttctctgagcctctaagttcctcatctataaaataggcataatggctgccgcctcacagagattgggggggcactgaaaaactgagaataggccaggtacagtggctcatgcctataatcccagcactttgggagggcgagccaggaggatcacttgagcccaagagttcaagcccagcccagccaacatagcgagactctgtccctacaaaaaaattaatgaaaaaattagccgggcatggcagtgcgcgcctgtggttccagttacctggggaggctgaggcaacaggattacttgagcccaggagtttaaggcagcagtgagttatgatcgtgacactgcactctagcctggccgacagaataagatcctgacttttttttttttttcttagagagtttcactcttgttgcccaagctggagtgcaatggcacgatctcagctcactgcaacctctgcctcccgggtttaagcaattctcttgcctcagcctcctgagtagctaggattacaagcacgcaccaccatgctcagctaattttttttttttttaatgagacggagtcttgctctgtcgccaggctggagtccagtggggagatcttggctcactgcaacctccatctcctgggtttgtgtgattctcttgcctcagcctcccaagtagctgggactacaggcgtgagccaccatgcccagctaatttttgcatttttagtagaaacggggtttcaccatgttggccaggatggtctcgatctgttgaccttgtcatctgcctgactcagcctcccaaagtgctgggattacaggcgtgagccactgtgcctggcgtattttattttttgagacaggctggtctcaaactcctgatctcaggtgatccacttgcctcagcctcccaaagttctgggattacagccgtgagccaccatgcctggctgaccctgactcttaaaaaaaagaaaaaaaaaaagaagaaaaaagaaaaaaaccctgagaataatgcctgacacatagggattggtgtttatttggcaaattaaaaaaaaaaaaaaatccaactctattgagggttcactatgtgctaaccattttgtgtggattactatgtcacttactattaccagtgcccccatgaggtgggtactattattatccctgttttacaaaaggaaaaacaggctcagagaagtgacgtcacttgcccaaggtcacagagactgtaggtggcagggccaggattcacatctaggcagctcagcttcagtctccgctccaagctactgaagaggcttgctgactatctgaatcgttttccagccaagcacacagaagccacaccccagggatggggcaaaagtgggcaaaacattatctctcttgcaagttgctcaaaccagccaaggcctgtgaggcctcagggcctttgcacatgctattctcactacctggatgctcttctcccagatctttctttcttatttttttttttttgaaacagggtcttgctctgttgcccagactggagtgcagtggcgtgatctcagctcactgcaatctccatttcccgggttcaagtgattcttctgcctcagcctcctgagtagctggggctacaggcgtgcgccaccacacctggctaatttttgtttttgtttttgttttttgagatggagtttcactctgtcacccaggctggagtgcggtggcatgaccttggctcactgcaacctctgcctcctgggttcaaatgattcagcctccctagtagctgggattacaggcacctaccaccatgcctggctaatttttgtatttttagtagagacggggtttcaccatgttggccaggctggtcttgaactcctgaccccctcaagtgatccccctgccttggcctcctaaagtgctgggattataggcattagccaccatgcctggccccagctaatttttgtatttttagtagagacagggtttcatcatgttggccaagttgatctcgaactcctgacctcaaatgatccatccagctcggcctcccaaagtcctgggattacaggcgtgagccaccgcacccagcctcttctcccagatatttctcgtctcacagggatttctacaaactcaccatccgggaggctgggctcagtgccaggaaggcgaaaggcgtagtggacgtaggcagccagctgtgggcagtgaccgcgggcatcctgggctgcctccaggctccggtgaacaaggctgactacatgggccattgcttcaaaggctccacggcccaggttcactgcagggcagagcagaggtcaagttccagggcccaaggcctctcacctccccgcccactttccaaatataaagacatcaggatttgagggatcatgtgctcattaaggggtcacaaatttttttttttttttttttttgagatggagtcttgctctgttgcccgggctggagtccagtggcatgatctcggctcactgtcacctccgcctcccaggttcaagcaattctcctgcctcagcctcccgagtagctgggattacaggcatgcgccaccacgcccagctaattttgtatttttagtagagaaggggtttctccatgttggtcaggctggtctcaaactctcgacctcaggtgatctgcccgcctcggcctcccaaagtgctgggatgacaggcgtgaaccgctgcacccgggccaaagggtcacagaagaccttctctgggtgcaggggactggaggtcatttttcagatgagaaaaatggccagagaggtaaatgggcttatagaagatccctcaggacctcaggactgagaagccatgtggatggggaaactgaggtctgaggccacattcgcttaccaatctggccactgatgatcgggggcctgatgaccagacgcacgagcttgtccagcacgtggtgggagaaggccacaaggggttcggggctggccaggcgcagtgctgcaagactggcccgcagctcctgctccacgttgccctcgctcagcacagtgtccttgagccggaatgggaaggctccctcctccaggacgtgcaccagggtgaagaatttgtccaggtaggggtcctgggtagggatgtggagtgagcagggtggggcctcagggaatgaagaccacccctgcctgaatcagcagcttcccttaaagctgggtccagctgaccaaagtcacgtccaaggcctgaggccagacctccccggccatcggcaactgttactcaatcgtagggcaggcaagaggggagcagggcgggactcttggttcccggcccaccccgtacctgggggtgcacagaggacacggctgtgagctccacactgaacacgcccttgtgaccgtccacccagcgcatgcccggaagcgccacctgtgggagggaggcaccaggtgggcactggtcagccctccctgactgatcaggtcacccagcggccccagccattgcgacactgcagcgtgagtgtagcccggtctgggggtgcagccaagcaccctgcccccagccctggtcccagtagactgagagggtccactgggcaggctggaaatccacatgccaagacgggggcagagaatggagacacagggtgaatgaatattcattgagtaggtcaggaaacaggataggaggatttgaggcctagggtcattaacaatggtgcattcatggggaatgataaggtactacgagggcaggggacagtgatcaggaaggcagtcagggtggctaaagtgggaatggagcagagaggcaatgggaatctttggggaggacatgtaggacacagagaggcattaataggggaataatgagctacacgggggccctggaggcaccagtagaggataacaagcctcccaggattgacaggaaggaaggcaggtgactcgggagtgcttctggggacagtgcattggcaggcaggagctccagggcacatacatcgggtgtgagcacggaatagctgggcggcggctggtccacagacactgggagacagaaggggccggtcctcaggcgcccgtgctgcagcagtgggatccactggggagaggctggaggtcaggtctgcggccaggttgggggacgaggagggctcagggggagggagggaggggacggctcacagtaaagcccacgggtgtctccagggcagtgcccggccggggctggcagctgacatggtagaaggtgaacagcaggtgatggttctctgtcacgcaggctggaagatgcagcttgaactcctcgtagaactcgggggacctggcagaatcgggctgggggatctgctgggggctggggtccccactgtctgccccatcacctctgccatgccacgcccttattgctgctaggccccactgtctctgctgtctgcctcagcttccctcattagcactctgggagcctctacctctcttcttcctgtcccccatcttcccatcgatgctgccttatgtgtatatataagggacatcctcctacccccatgagtgcccccaagttcctcacgtgtccccctacatacttgttatggtagaccaccggtgtgaaggcctcgcgggtaaattcactgcagctggacttgccaaagatgacctgggagagtggattcatgagggacccatgggggatgccctaccccccttccctggggcacagccactgaccggcagagcctggctggggtcctcgcctgtcatgtactgcactcgcacagcaaggttgcgcacggagccctggcggctgctgaagttgaggctgtgcgggtacacgtacagcaggttcctgtggggggcaggatgggggtgtcagagggacaggggccctgaaggtgcacatacaaggctggggtgatgggacaaggctggctgggagcacagacagtccaggaagagtaggtcatgaggctggggcattgagggcccggtgagaggtaatacaggtatcagtcaggagataggacagagggcagagggtgggggacaagcgagcaccctaaaaacacagattgggaacagtgtggtagagggtgggaatacagaaggacattggaggcactcatggggcacagtgacacacagaaggcagagaatagcgaggcactcagggccagagttccaaggtacctcaggtggccagtggtcaagcctaagccccacccaagggcctgactgcccttcccccaggaggtcactagagttatgtggcctgtttctcaggtggggaaactgaggccagagtccgagtcctgcctccttcccccaggggcaactctgtgcaagccttgacccctctctgggcctcagtttccctatgtgtataatgggcacttcaggccttccagctgagcctttgtaatgatactgatgatgataaataacaacaatgacaataattgcaccaaacactattactacaacaatgaaataatcgcgcctactgtgtgccaggctctgttctaagcactcaacatgaaataactcatttacttctcacaagtagctcatgaggcaggactaacatcaccgccattttacaagcagggaaactgaggtacttgcacaatcacccacggagtaaaatggcagtcagtggtgatctgggcatatgcaggtcttggagatcaggctgtgtgaccttgggagagtctctgccacctgcacctgcccccttggatactaaccaggccaataaaagcccccacgtggcaagtatgtgggaggggaacaagagcagatattgtaatggcaggtcaaacagctcagggcaaaccatcaatgcttataaaatctttactgttattaccatcatcattgcgatgcctattcatagatggagaaacaggctcagcatggtgagtctcaggaactcccagcagggtctggggcccgtcctctcccaatgccccccacccacacctggccctgagccccaggaagcgtgatcccggcgtggcctagccggacattcgcctgatgcaactatcgcaccactgccaggcccttgtgcaatgcggggcaccaggtcggccagttaacgattgactggggatcagtgggggtatgaggcataaaaggcttcagtgacagtgctgtggctataccttagaccctcagtcatgccagtgcctgctctgtgcctgctctgggccctggcaatggtgacccggcctgcctcagcggcccccatgggcggcccagaactggcacagcatgaggagctgaccctgctcttccatgggaccctgcagctgggccaggccctcaacggtgtgtacaggaccacggagggacggctgacaaaggccaggaacagcctgggtctctatggccgcacaatagaactcctggggcaggaggtcagccggggccgggatgcagcccaggaacttcgggcaagcctgttggagactcaggtgggcaccgtagctgcgacactgtggggtggccaggagtccaaagaggagttcgtgtctagggtaaccaaccatcctggtttgcccaggactgaagggattcctgggatacaagattttcagcgataaactcaggcaagtccttaggtacacaaagatgagttggacatcctactagtgacccactgtttattaagcagatggaggaggatattctgcagctgcaggcagaggccacagctgaggtgctgggggaggtggcccaggcacagaaggtgctacgggacagcgtgcagcggctagaagtccagctgaggagcgcctggctgggccctgcctaccgagaatttgaggtcttaaaggtaaggagctcccccaaccctagtgggctgagaccctgatttccggccagaactcgcttctgcaccttgagtcccaaagacctcccagatcagcctcccagctctgtggcctctaccctgcatgtccccagacaaaactcaagtccttttgtgtgcctcagtttcccttttgtgtgcctcagttgcaaataagggcaacacctgatatctcacagtagggccaggtactcaatgcaggtaaaatattcagcatggggcgggcacacagttggtgctcaataaattctttttttttttttttttgagacagagtctcactgttgcccaggctggagtgcagtggtgtgatcttggctcactgcaacctccacctcctaggttcaagtgattctcctgcctcagcctcctgagtagctggaattacaggtgcaccagctaatttttgtattttttagtagagatgggatttcaccatgttggccaggctggtctcgaactcctgacctcaagggatctgcctgcctcggtttcccaaagtgctgggattacaggtgtgagccactacacctggccaataaattcttactactagagaaactggtaacattttgtgagcacccagtaagtacccagcactgttctatgccctttaataatccatatgatggccgggcatggtggctcatgcctgtaatcccagcactttgggtagctaaggtgggtggaacacttaaggtcaggagttcgagaccaccctggccaacatggtgaaaccccgtctctactaaaaatacaaaaaattagctgggcgtggtggcacatgcctgtagtcccagctactcaggaggcttaggtaggagaatcgcttgaacctgggaggtggaggttgcagtgagctgagatcgtgtcattgcactcagcctgggtgacagagagagactcaaaaaaaaaaaaaaatccataggatgttcatcacctccccatgaagtgagtcctattttatccccattttacagatggggaaactgaggccaaagagcattgttgacttgctgggtcacacagatacaatgaggggctggggcagagggtcaggggatgggaggtgaggtggctgtcggctgaggtttccattctgacccccacaggctcacgctgacaagcagagccacatcctatgggccctcacaggccacgtgcagcggcagaggcgggagatggtggcacagcagcatcggctgcgacagatccaggagaggtgagcctggcaggggtttggcaggcagggcagttggatggggggcgcacagggcagctggaaaggggccccctcacctgggctgagccacatctccctccccagactccacacagcggcgctcccagcctgaatctgcctggatggaactgaggaccaatcatgctgcaaggaacacttccacgccccgtgaggcccctgtgcagggaggagctgcctgttcactgggatcagccagggcgccgggccccacttctgagcacagagcagagacagacgcaggcggggacaaaggcagaggatgtagccccattggggaggggtggaggaaggacatgtaccctttcatgcctacacacccctcattaaagcagagtcgtggcatctcacccagggtgtctgtgtgtgtccttggcttagggagaccccacccagcatgatgtatgaatacctcccattcaagtgcccagctgggccccagaggccgtacctgtagctggtatggggggcatagacttcgcgggcggggaactccagaatctccttggtgggccggcccctggggtccgggtagggcttgatatgaagcagctcaggggagaggcagaagtggggattttcaggagccggagaaatgtcgatcttgagctgggctgggaagggaagaaccggtttgcacctgcctgggagcctcctggctcagcccaccctttctgggctgtgtagtcagggcagactctcccatgatgttctctggggactgggggctgtgtccctcaggcgccaaggccagaaattgccctcaactctgctgtctgtcaccctaaattttttttcgtttttgtttttcttttttttaagtggagtcactctgttgctcaggctggagtgcagtggggcgatctcggctcactgcaacctctgcctccccagttcaagtgattctcctgcctcagcctcccaggtagctgggattacaggtgtgtgccaccacacctggtgaatttttgtatttttagtagagatggaatttcaccatgttggccaggctggtctcaaactcctgacctcaagtgatctgcccgcctcggcctcccaaagtgctggcattacaggtatgagccatcacacctggcccccaggctggtcttgagctcctgggctcaaacaatcatcctcctgcctcagcctcccaaagtgttggcgttacagacttgagccactgcaccccagccttacccctacatttgatcaactctgcccccaggacccctgcctgccccgctgccattaaccacctattgacgctgtatccatcttatttattctgcttcttgtctatggtccccattagaagctgtagccagcccctgaggtcagggatttgtccatcatggtcatcgttgggtctctgatgcccctggcacagtaggtgctctcagtgtaggtttgttgagtggctgagtgagagtgatacttcttgtgtatggggtgtgccacgcaccagtcacaggacgtagtcgccgcagcagggacgacgggcgcctcatgtcagccaggaacttgaagaggtcctcgtcactgagtcgctcagcctcctacatgggacccactcccgtcagcctgggccagggggctaggggtccccagggctaatgcagccagcggggagtgggagagtccctggccccagggtaggacacctgcttaaagaagtttgtgacagttagcgtggctggacggaagccagagaagctgcaggcgtcgtccccactactcgcccggtcctggggcccccgacggcggcggtctgtccaggctggccggcgctctaggggagggaatgacaatgacaaaagggggaccaagatgaaacagggagactcaggggcggcacagttcggccagcagagggcgcaccccctcgccccgtagccccgccccaggcctgtcagcaccaccctttagccccgccccaagcctgttagccccgcctcctcaccgccctccgagtcagagtcccggtccagctgcccagcgctgctcacgatgttggccaagtgcacggccgtccaggcgaagggcatgcggtagcggcccaggcgggtgcagaactgctcggccgccaggcgcagcttctctagcttctctttgttctgtggggagaccccgtcccctgccagctcagcatcctagccctgctgagtcagggatctgttgcccctagtccagcctccacacgcttaccttggctgtgtccacttctttcaacaccatgtaaggctcacagcactcactgatgtccccttgctgaagcaccttctccaactgcggggcagatgaatgaatccagtgaggcgctgcccgaacgctctgttcccccgtgctggctccccagcctcctggacccctcatgggccctcggacactcctaacatatgaaggcctttgctccaacacctcccatggctcccgctgtccttgggatcaagggttagtgttggcctgcctggtggctactccctcccattcttcagatctacccctaacctccaagcctacctttagctggtgatattttccctaaatttacttatttatttacatttatgtatgtatgtatgtatgtattatatagagacaggggtctcgctatgttgcctaggctggtctcaaactcttgggctcaagtgatgcccctgcctctgcctcccaaagtgctgggataacaggcttgctgtgaatttttttttttagacagagtctccctgttgcccaggctgaagtgcgtgatgggatctcagctcactgcaacctctgcctcctgagtttaagcaattctcctgcctcagcctcctgagtagctgggattacaggcatgacccaccacacctggctttttttttttttttttttttttttttgagatggggtctcgctctgtcacccagacggaagtgcaatggcacaatctcggctcactgcaacctctgcctcccgggttcaagcaattctcctgcctcagcctcccaagtagctgggactacaagcgcctgctactacgtcccgctaatttttgtatttttagtagagacgaggtttcaccattggtcaggctggtctggaactcccaacttcaggtgatctgcctgcctcggcctcccaaagtgctgggattacaggcgtgagccaccgcgcccagccaatttttgtgtttttagtagagaatgggtttcaccatgttggcaaggttggtctcaaactcctgggctaaagcgatcctcccgcctcagcctcccaaagtgctaggattacagttgtgagtcactgtgcctggccttccctacatttttctttgttagtgtaaatagaggccactctgggcatggctctgagccatgaggcctagactccaatcctgaccactcaggggctgtgggaccctgggcagtgggaccctatccactctgtgcctcagtttccccatctggaaaatgggaaccatggcacccctccaccttaggccctgtggtgaggactgaaggagggatccctgtgaagcgtgaccatagcagcacctgcctgtggatactggattcatttcatcattgcaaactaatagaaggttttgagaaaagaaatttgacctccctcccagaaacagaaaatctcaaatgagggtgccaactatgtctttcatctgtccacaaacttcccaacagcatctcacccacctccgaggaccccagcctgtcacatgtgcctagggatggcttttctccccaggctgcccacgtatagttatcagctcaactgtcgcctctccctggaagcccttggtgatttctccccacctgagttggatcaggggcctcctccctgcctgtgtttcccccacaacagccctgattacccttcttggtgatgtatctgtctcattctgtgaaggcagggactaaatcagtgacattcgccattaccacccccttgcccagccccagcaggcaccttgatgaccaggaagatgtcaggtgaggggtaggtcacagagaagatggcagagcgggccagggtggagatggcagggtgggtgccatgagcccgaagcagccccttcatggagtccgagttcaggtcgaagtagaagttctccgagatctggggacaccagaggcagctgggccaccacctctgggaagcccacagccccccaacaaggagaaggaaggggaggaaagagaaaaaagggcctcctaccttctttttctcccgcacatcatacagagccaagatcccaaagatgggctcaatttcaatctcgaacctacaagtaaatgggagggagggggctctccttaacacttcccgctgtccacacaccccactccctcttgaggcccaaggtggggggcatctgactcccactgggccacatggaaccgccacttaagggcttgcagaaaaggtacatctcattttgcaaaaggggaaactgaggcactgaagttttttgttggtttttttttttttgagacagagtctcgctctgttgcccaggctggagtggagtggtgcgatctcggctcactgcaacctctgcctcccgggtttaagcaattctcctgcctcagcctcctgagtagctgggactacaggcacgtgccaccatgcccagctaattttttgtgtttttagtagagacagggtttctatgtatgtatttatttattatatagagacggggtctcgctgtgttgcccaggctggtctcaaactcttgggctcaagtgatgcccccgcctctgcctcccaaagtgctgggataataggcatgagccatcacgtccccggcttgctgtgaattttttattttatttttttagacagagtctcccctgttgcccaggctgaagtgcgtggtgggatttcaccatgttggccaggctggtcccacccgcctcagcctcccaaagtggtgggattacaggcgtgagccaccgcgccccgccgacactgaagtttttttccccctccctacaccctcagtaagtaactcacacagagctcctcctccctgcaaccacggcccttgttccgttggcatgggggcagttttgggctcaacaatccccacatcttgaaattctcaacttccgggtttccccatccctcctttctggggtgtcatctgccgccattgtcactctgcacggagttcccatctcgctcacctgaacggccaccataaaagtccttccctgtcttactccaccttgctggcctccgctcaccacgcacctccaaactgaaacactgagcactccccgttacaccccttccatcctctctattcagccagctcctcttcctcactgggtctccatgtacacgtccccctgcaagggaagctgtcccagatacccgctcgcacccctcaagctgggccaggggactcctccaggactctaggcactttcagcatcgcttatcccggctctgtgtggtcatcgcatggttatgtgtcctgtatacagtagggacttcataaatgttttatttttgtttctttgtttgtttgaggctggagtgcagtggcacaatctcggctcactgaaacctctgccctccgggtcaagagattctcccgcctcagcctcccaagtagtggggattacaggtgcctgccaccacgtctggctaatttttttttttttttttcagtagagatggtgttttgccatgttggccaggctggtctcaaattcctgagctcaggtgatccgcccgccttggcttcccagagtattaggattacaggtgggagccaccgtgcccggccaataagtgtttgttgaatgactggatgagcccacagagccaggtcccaatccttgtgtttagggcaggaggcccacccaggcctcaggccagaatggagcctccctttcctgccccgatccaggcaagaactcggggtggggagcggcagggccaggctcaggtccaagtccacatcctgttcaactctgttcccacgcacttctgctgctccccgggggctggtgtggaggggccctgggcggctgagagccaggcccagggtcactagcacccgccccaaagcctcccggccaaaccctggatcccagcagcagagcaggcaagcgccagactccagccttacaagttgtatggtcttggcgtcatgtcaccactctgtgcctcagtttccccacctgtgcccacttcatgaggttgtggtgaatataagacgggttcatatacatgaaaggctgagaactgatcctggcatacaattggcacttaaggattggagactcgggataatgaaaaaggaagtcttccttcccccataaaagcccatacataggtggccacataggtgacagggccgcacacggtaatggcactactcatgtagtgtgtaccccgccggaacccatgtggttgcttcacgcatctaagaagagagacatgtcagtatactcacttgagcgacagacacttgaccaagatcctttgtccaaagtgctcgcggggtggctctgggcggctacagcgttccacggcttcatcctgccaagagtggggggtgggagctgggcgggaggagctgggacatcctccaggaagggtctggaatgcccagcctcagaccagctctaccccagcctgactaaccgtctttccatccctgcctctgagcctttacacgtgctgttcccctgcctggaatgcccatcttctcccactcctccttgtctcgctaatgtctgctcactgttcatatatacttctactatatagaggtatatagtaggtgtccatatatagaagcttattttttttttttgagatggagtctcgctctgtcacccatgctggagtgcagtggtgtgatcttggctcactgcaacctctgcctcccaggttcaagtgattctcctgcctcagcctccggagtagctgggattgcagcttagccaacacttcctccaggaagtcctccctgacccctgaggcctgggcaggcacctctttcgggtgcccacaatgtcctggtgtaaggagccatggtggctgggacactgaggaccgtgtgagggacaattaccagcacctcatcatggcactactctgtctgggttatacgttcctagtagagaggtctctcctccgctagtgaactctgaaggcagggactgggtctctctattcatggctatatccccaatgccaacaatacagtgggtacccaaacatgttagtcgaataattatagaggtatacaataggtacctactaaaagttagttggatgaacataagcatatacagaaagcattcaataaatgttgactggagatatagggatatacacccaataacgcacccagtaagtactgattgaataaatatgggtgtatatagtaagcactcaataaatggccaaatacaaccacaggagtatatactaggtaccaaataaatgttggttggataaaaatagacatatgtggtaggtgttcaatagatattggttgattaaatagagaactatacagtaggcattcatgtattgaataaatatagggatatacagttggtacccaatacatgcttgttggataaataatttttaaaaatttattttctggccaggcgcagtggctcatgcctgtaataccagcactctgggaggctgaggcgggcagatcacaaggtcaggagtttgagaccagcctggccaacatagtgaaaccctatctctactaaaaatacaaaaattagccaggcatagtggcacgtgcctgtagtcccagctactcaggaggctgaggcagaagaatcgcttgaacctgggaggtggaggttgcagtgagctgagatggcgccactgcactccagcctgggtgacagaacgagacttgtctcaaaaaaaaaaatttattttatatatttttttacctttcctatggtgttgatggttggataaatataggagtatatagtaggtgtccatatataaaagctattgaggccaggcgcggtggctcaagcctgtaatcccagcactttgggaggccgaggtgggcggatcacctgaggtcaggagttcgagaccagcctggccaacatggccaaaccccgtctctactaaaaaaaatacaaaattagccgggcgtggtggctggcgcctgtagtcccagctactcgggaggctgaggcaggagaatggcgtgaacccgggaggcggagcttgcagtgagccgagatagcgccactgcagtccagcctgggcgacaagagcgagactccatctcaaaaaaaaaaaaaaaaaaaaagctattgaataaacacaggggatagagtaggtgcccaataaatactggttagctaactataaaggtatatagtaggtgtccatatacagaagctatcttttttttttttgagacagagtctcgctctgttgcccaggctggaatgcagtggtgcgatcttggctcactgcaacctctgcctcctaggttcaagtgattctcctgtctcagccttcagagtagctgggattacaggtgcccactaccatgcctggttaatttttgtacttttagtagagatggggtttcaccatgttggtcaggctggtctcaaactcctgacctcaggtgatccacccgcctcagcctcccaaagtgctgggattataggtgtgagccaccacgcccagccagaagctacttttttttttttgagacagagttttgctctgctgcccaggctggagtgcagtgacggtgatttcggctcactgcagccttcacctcccgggttctggcgattctcatgcctcagcctcctgagtagctaggattacaagcacctgccaccatgcctggctaacttttgtatttttagtagagatggggtttcaccatgttggctggtcttgaactcctggcctcaagcgatctgcccacctcagcctcccaaagtgctgggattacgggcatgagccaccatgcccggcctagaagctattaaataagcatagggtatacaataggcacccaataaatgctggttggataaatataggggtatatagtaggtgtccacatatagaagctattgaataaacataggatatacagtaggtgcccaataaacactgatcggattaatacaggtgtatatagtagatgtccatctatagaagctattgaataaacatgaagtatacaataggcacccagtaaatgctggttggctgatatctgggaaggggcacccacctcgtcaggtgccgggtagagggtgagcagggccgggggccggtgctgccgtcgaagggtttcattgcgccggtccacatcttctggggccgcccgctctagcagagagggcagcaatgagtcagctgccaggttcctcaggtcgaagatgctagaggcaccactgcttcgaggggtgtcttccggggagcccgagccacgccgggagtcattctgccagtggagaatgtgcaagcactgagtgccagctgtatacaccttcacctcactctggtgagagtgtcctcatactcattctagagatggggaaattgagggtcagggggtgagggtcatcactctaagggtcacctgggggttttgcctaccctctttccagaaacttctgtctggagagcctcccaacttttaccattgctgggggaggctactccttatcccacatttggggctttaggtgatccttatctggtcaatcaaaacacatctacccaccctagggactggctccaagggcctgggctgggccaatgaaagccttccctgggactttgttcactgtcgccagggaaggagagagttcttcctgaccttcctgcactggatcaaatcccagctcagctctgtgacactgggtctctgacccccaactctaagggcctcagtttccctatgtacatctaaaaataataacaaaattagccggcatggtggcgcatgtctgtaatcccagctacccgggaggctgaggtgggaggatcgcttgaatccgggaggtggaggttgcagtgagctgagattgcaccactgtacttcagcctgggcgacagagtgagattccatctcaaaataattaattaattaaaataataataataatgaaaacaacaataatctttggaataattatggttggtatacagtaggtgctcagtaaatgttgattgacaaaatacaggctcacggcctctaagaaccttgctgtgcctcagtttccttacctgggtgtaatggctgccctgactcctaggatgaaagcagaggacacatatgaagccttcagtacaccctaagcactcaataaatgtttataattatgacccctaactttttactcatggggactgatgcaattccttttgagctcaaggctgtttgggtcatttcctgtcacatgtgaccaaaagctgaggccggagcctccacacataccccttcagtgaccccagccaggggcttcctcaccgagtcctcagggccggacctctcgtctccagaagcatcctgctcaaagacctggcgggggaggcccttctgtcgctcccgctgtgtgtctgtggtgacggggctgtatgctgcactcaggtactgatacctagcaggaaacggggctgggcaggtagggagggctgagggcccccagggggtccccagtgtgttctgacacacctacatggcaccttcaaagccaccgtccttgtgctccaccagacaagtttgcctgctcttgcagggacaatgggcagatacacagtaggaccggctgcagacatcagctcagcccttttgggttccgaaccccctgagctgcccctaagtcagactcaccttctgtggacaatgacccagtcctcaatatacatctccaccgcggccctcacctgggcatccagttttctgcagcaaaagaagatcagggtaaacagagacaaggcctctgtgaatccttctgctagcctgtaaggttagcactgtcctgcctattccagacaaggggagatggaggctcagagaaaaagcatggcttgtccaacgtcacggccaagccaggagctgaagtcgggctgttgatggggttggcagagacagagtggaatcacaggcagagagggcgtggggctgaacccactcatccttggggatcccgggctccgtggtccggcattcccggggctgcagcagcagctccaagtcatcagctgggaattctaccaggtccctgaggggcccgggctcagcatctggtggccggctcagaagtacatcctcaaagtccaggggctcgacaacttcagtcagtgggacctggattggagcaaagtggctgtgatcgcactacctaggaggctgagagtgggggcacgaggcaggggtgggtgcgcgctggcttcaaactcaaataggagggcggtgggagccatggagggtgttggagttacggaggaaccatggaggatgatgacctcagactctccacccccacctcagctttccctgccctgcccctccctccaggggctccaggaaggaaatcacaccccatgcctggaagggcagaaactaacagtggaaggaaagaaatgttgacagaggccaggcaagagacaattcctaaagcctccgcaaccctgtgggcaacatggccccacccctctcaggcgaaagtcactcccctccccaacttctccctcctccatccccatctaggtggtccaggtggctggagatgggggacatcaggagggagccactcccctgaccacccacagggtgacaagcagcggcagggagagtggccacaggaattggtgagactactaggaccaggacaggcactccctcccccgacactgctgggtccctctcggtttccccccaggacaggccacaggagggagggggtgggatagaacctaggccaaggaagcccctacctctgtctgagagagggcagagggctgggggcggaccccccaaatacttacccccagggagctgctgcagcgcctgctggagtggggggagccactgcgttcccgggacacctgcttccgcacctctgcggccaccgtcctggaaagatagggagggggccattggggacgggaaaactcaggcagcggagcggacagattctttctatgaggaaaatccagattgtggaacgaaataaataggccgagggccaagagaaccaggagtgctgaggctttaagggcccacagctccccagttcccccaacgcgttccccatcaagcacagatcaggagatgagaatgctgccaccagtggggtctgaagccatcacggactctccttcccctcccggctgggcctgtggccttccaggtctggagggaggcccacgggtccctggcctctgctccctcatctgggggacctctgtccatcctgctgttccccaacacacccagccctgcccctggaccccatccagaacatacatcccttcccatccttgctttggggctttggataagtcatttccacctctgagcctcagtttacccttctgtagctgatgccctgacttcacagagctgctgggcagagcggagcctggggcctggcctgaagtcacagagatcctgagatgaggccattgtgtcagaggtcaacctggcctgcggggcccagagctgggaggccttctaagtaaccccaagcaaccaaggtgggccctggggccttcctgggccacctggatctgagcaggccttcaaaatcagggaggatggccaggcatggtggctcacacctataatcccagcactttgagaggctgaggcaggcggatcacctgaggtcagaagttcaagaaggtcctggccaacaaggggaaaccctgcctctactaaaagtacaaaaattagccagactcctgtagtcccagctactcaagaggctgaggcaggagaatcgcttgaacccgggaggcgcaggttgcaatgagtcgagatcgcgccactgcaccccaacctgggcaacagagcaagactttgtctcgaaaaaaaaaaaaaatcagggaggatgggggtaaaggggcaagactcgcagtagaggggactctgcaggaatgtggagcagagccagtggggacagggatggctcagccctccaattcctctggctgagctcagaagtggatgagagagccatgcagttacctgagggtagagggtgcccagcagggggcacagcaggtgcaaaggacctgagttcgggctccgtgctttgagtgtggagactcctgctccctggggtctctgtgaaggcaggagctagggctgtgtgtcccccaaagagggccttgcacatactaggcacacactccttttttttctgagatggagtttcgctcttgttgcccaggctggagtgcaatggccacaatcccggctcactgcaacacctgcttcccgggttcaagcgattctcctgcctccgcctcctgagtagctgggattactggcatgtgccaccacacctggctaatttttcgtatttttagcagagacggggtttcacaatgttggccaggctggtctcaaactcctgaccttaggtgacacacctgcctcagcctcccaaagtgctgggattacaggcatgagccaccgctcccggcctactttttttttttttttttgagacagggttgctctgttgcccaggctggagtgtagtggcacgatatcggctcactgcaaccttcgcctcccaggctcaagcgatcctcctcccacctcagcctcagcctcccaagtagctgtgattacaggtgtgcaccaccatgcctggttaatctttctattttcagtagagacagggtcttgccatgttgcccaggctggtctcgaactcctgagctcaagcgatctgcccgccttgtacttttttttgacagaatgagtgagtcccttccagtcttcttctacaacttgcccaaatctgctgagtgaggggaagccccaggtcttctggctgtgtggctttgggcaggtaggataccctctctgggccttagtccctcttaaaatagacaagctgattgcctgggttttcagggcttactcccttctgcttcccaattccctgtgtaattgtaaatttttttctttttctttttgagacggagtctcgatctgttgcccacgctggagtgcagtggcgcaatctcggctcactgcaagctccgcctcccgggttcacgccattctcctgcctcagcctcctgagtagctgggactacaggcgcccaccactacgcccagctaattttttgtatttttagtagagacagggtttcaccgtgttagccaggctggtctcgaactcctgacctcaggtgatccgcccgtctcggcctcccaaagtgctgggattacaggtgtgagccaccttgcccggccccatttttgctcttaacagtcttggagtcttgcttctactgactgggggggttgagaaaagcgcttgtggggaattcaaaggatgtgaaaaattagggcttttgtcttcaaattcctaaagtcgggctgctgcctccagaaccgtgggcacacaggggctgggggataatttacaaaagatgctgggacaggggacaaagctgtgccctggtcccagctgttctgcagctgctgctccagaggagggagaggggaggagggacggctgggcctccagcttccttttccccttggccttggagagaggcccctgcagtgggaaaacgccgggtctgcaacaccacagccacagagccagctgactgcatcacaggactctgcacggagagccgtcaagcttggatgagtgaccatcagtctctcagcctcagggctcaggccactgaccaccttcttgagctgttctgagtgtaaggctttgcacacagtaagtgctcaattagggcttgctgccaccatgttgtcttcaaagacaatcctaggcagctgggatttctgaccctggttttttgttttcgttttttaaaaaaattttatttatttttttgagacagagtttagctcttgttgcccaggctagagcgcagtggcatgatctcagctcactgcaacctccacctccagggttcaagcgattctcctgtctcagcctcctaagtagctgggattacaggcacccaccaccatgcccggctaattttttgtatttttagtagagatggggtttcatcatcttggccaggatggtctcgaactcctgacctctggtgatgcacccacctcagcctcccaaagtcctgggattacaggcgtgagccaccgagcccggcctgtttttgtttttttgtgtctgtttttttgagacaggtcttactgtcgcccaggctggaatgcagtggtgcaatcacggcttactgcagcctcaacctcctgggttcaaggaatcctcctgcctcagcctcctgagtagctgggacaactgatgcacaccaccatgcttggctaattattattattattattattatttgtagaaatggggtctcactatgttgcctagtatggtctcaaactcctgaccttccgtgatcttcccgcctcagcctcctaaagtgctgggattacaggtgtgagccactgtgcctggcctctgaccctgtttttacaccaaggtgagatgtagatggcaaccatgagtgtcaggcatggtggcttgcacctgtaatcccagtgctttgggaggccaaggcgggaggatcgcttgagcccaggagtttgaggctgcagtgatggcaccagtgcactccagcctgggctacagagacactgtctcttaaaaaaaaaaaaaaaaaaaaaaaaagctgggcactgtggcttatgcctgtaatcccagcacttcgggaggccgaggcgggcagatcatctgaggtcaggtgtttgacaccagcctggccaacatggtgaaaccccatctctactaaaaatacaaaaattagccaggcatggtggcacatgccggtaatctcagttactcgggaggctgaggcaagagaatcacttgaacccgggaggtggaggttgcagtgagccgagattgcgccactgtactccagcctaggcaacagaaagaaacgctgtctcaagaaaaaaaaaaaatccatctataagccaggtgttgtggctcatgcctatactcccagcattttgggaggctgaggtgggaggatcacatgaggccaggagttcaagaccagcttgggcaacatagcgagaccccatttctaataaacacaaatgtacacacacacacgcacacagaaaaaaccatctgtgattattaagcaaggttgaaaatatgccaatccagcaattctactccaaggtgtggattactcagaaggaaacacatggccaagaatgttgacacctctgatcatgacagctccaaagtgaaactcacatgttcactgaccaaagagggaaataaatgcatgaggcaggggaatactacccagcaatgaaaaaggattgcaggcaatggcccagctgagccttcctgacatgatgctgagtgaacaaagttgggcacatggatgcaacacctcatgattcagtttatatgacaatctaaaacaggccagatcaggtaggggtgctggcatgcgggagggagccaggaaggtggagatagtccccatgggaaattgaccaagtggccatttcctcatttccttgccctttgctttcaaattattctttaaacttcgcacttttctttctctctctctctcttttttttttttccttgagatggagtctctgtcgtccaggctggagtgcagtggtgaaatctcagctcactgcaacctccacggcccgggttcaagcgattctcctgcctcagcctcctgagtagctgggattacaggcacccaccaccatgcccagctaatttttgtatttttagtagagatggggtttcaccatgttggccaagctggcctcgaactcctgacctcaggtgatccgcccacctcagcctcccaaagtgctgggattacaagcatgagccaacgcgcccggcctataactattctttaaacttttctttctctctcttttttttttcttgagacggagtctctgtcacccaggctggagtgcagtggcgtgatctcagctcactgcaacctccacgtcccgggttcaagtgattctcctgcctcagcttccccagtaattgggattacaggcactcgccaccatgcctggctaatttttatatttttcgtagagatggggtttcaccatctacagacccgaactcctgacctcaggtgatccacctgcctcagcctcccaaagtgctcggattataggcatgagccaccatacccaggctactttctttttctttcttttgagacagggtctcactctgtcactcaggctggagtgcagtggcgcaatcacggctcactgcagcctcaacctcctgggctccagcaatcctctcatctcagcctccccaggagctgggactacaggtatgagccaccatcacacctgggtaattttgtttcttgcagagacagggtctcgctatgttgcccaggctggtcttgaactcctggcctcccaaagtggtaggattacaggtgtgagccatcatacctggcccaaaatttgtagtttttggtatgaatgttgtatgttacagttgtttaaatggtaaaaaataacaatatatgtatgtgcttgtgtttgccaatatattcaaggatgggggagagagagagagagagagagatgtttacctgaaatttcagtggtaactttgggattttgaaatttgtcaataaatacctcattttcttcccacccctccaatgaatcattatttcttttctttttttttttttttttttgagatggagtctcgctctgtcgctcaggctggagtgcagtggcgggatctcggctcactgcaacctctacctcccaggttcaagcaattctcctgcctaagcctcccgagtagctgggattacaggcgtgcgtcaccacgcttttgtaaatttgtaaagttacaaaaagctaactttttgtatttttagtagagacggagtttcaccatgttggccaggctggtctcgaactcctgacctcaggtgatccacctgcctcggcctcccaaagtctgggattacagacctgggccgccgcgcccggccttttttttttttttttttttgagacagagtcttactctgtcacccaggctggagtgcagtggcacgatctctgctcactgcaacctccacctcctgggttcaagtgatcctcctgcctcagcctctggagtagctggaagattgtctaatattcgggttaatctggtatttgtggaataaatgactgaatggatgaacagatgaatataggaccagctctgagtatgtagacacctgggtgcccaagagcgaagttgctctggaagccctgggccactccctcacagttcactagggccccaggatcattctctactcttaccctgagctctacagtatccaaaacccctctttctcacttgagtaaaaaccaggacccaaggacatacagaccaaaatgcaaagaaacagacagcaagctgggcgcaatggctcacgcctgtaatcccagcatttgggaggccgaggcaggaggatcacttgagcccaggagtttgaggccagcctgggcaagatagtgagatcccgtttctacaaaaggttaaaaagttagctgagtgttgcagcatacacctgtagtcccagctacttgggaggctgaggcaggaggatcacttgagcccgggagattgagactgcagtgagccaaggtatcaccactgcactccagtctgggtgacagagcaagaccctgtctcaaaaaaagaaaaggaaaaaaaaaaaaagcctgggtgcagtggctcacacctgtaatcccagcactttgggaggtgggcggatcacctgaggtcaggagttcgtgaccagcctggtcaacatggtgaaaccccctctctactaaaaatacaaaaattagctgggtgtggtagtgggcgcctgtaaccccagctactcaggaggctgaggcacaagaatcgcttgaacccaggaggcgaaggttgcagtgagccaagattgtgccattgcactccagtttgggtgacagagcgagactctgtctcaaaaaaaaaaaaagaaagaaagaaagaaaagaaaaagaaaaggaaagaaaaagaaacagacagcaataatgtttgcagcctcaaagacgccaaaggtctaagacattttgaaagccaatttacagacaaagataatgatagaacataaaaattgcccagccattacgccccagccaccaagtctcatccctcctctgctgagaactccccatggctcccacctcacctggggtccaaagtcaaagtcccttgcacagcccacacgaccctgtacattctactcttactgtccccctccagctctctgttcctgcctcagggcctttgcacaaacccttcccactctttccccccacaaactggcctcgatcgatccctctctcatctccttgaggtttttgctcaaaggcacctgctcatccaggccttcctgacccacctcccgcatctcaagcagcccccaccctcccatcccccttccctgtcttcttgtccctacagcacttgtcactgacaggtaatctactcgatcaggcttctggtctctctccgccactatatcccaagagggggatcttttgtctccataagaccagggcccaacccacagggcagctctttcacctgggggcagtcaggacaggtcccccggggagaggatacctgagcttctgaacgcacccttgtcgcaaagaccccccgccaactgggggcgaggcttttcagccccagagagtctgatatacccctcccaggctgtgactctcacaatccccagtggccacggaaatggatcccccagcgcctggggcctgtcccctcccccgtctgcccaccagctggttctgtccccagcccccactccctccattcaatcacccatccatccccagcgcggtccagcccgtgacgggagagcctgaagcagaaggtgggggggcgtccacagctgtcccccttccccccccccgacagctgggcactggaccctggagggggaagggcacgggaaactcctcgaggggtttcaaacgccaccaaggagcccatctctgtccccaaatctcagagcctggagcctccctgccccaaaccaggcactgaggaaggaacagaaagtccggcccaccccgatctccgagagcgcggggacagtgaggggccgagaggcggacggggagcgcagggagttcagggggcgcccgtcatccgcatccccacgccacctcctccgggaagccctccggacacacccccgcgcgtcacggaggcagaacggcagccgccatcgcgctcccagccccgacgcgactcccatctgggacccccgccgggacccccgcggccctccccgccttctcccgctcccagccccggccggaggaagctggcgggacccgggccgaggcggaaaggggttgaattgggggcgcccgggcggggagggtcgcaccgccccggggcggagccgggccacgtgggggaggtgggagggggccccgcggccacactacctgttgatcttgtgcgcgaaggcgcggcgctcggaggcagccatggtcctcgcgtcccgccgccgccgccccgggccccggccccgccgccgccgccgcctcccggttctgggcagccggggcggggcggggccggcgcgggggcggggcccttccgggtggcccgggccgctccgtgctgcccctgcaggccggaggggtcgcctggagtcctgggggctggggaaactgaggctggggacggagaggaggccccgggatccaggctgggcgggccccagactcccgggctggggggacgctctttctaccctaggagaagggctggggaaactgaggctgaggagggaagttagggagaggaggcgctgggacccagactgggggtgccccagactcccgagctggcgggggcgctctttccaccctgggagctgggctggagaaactgagcctgaggagggagggagggaagggaggcgctgagacccgggctaggtggaccccaggctcccggggtttagtggggtggtcttaccaccccaggagcagggctggggaaactgaagctcaggagggagggagggaggggaggcgctgggacccaggctgggtaggccccagatttccggggtttggggggcgctctttctgccctctgactcctggctggaaaacaataacgatgttcatgtatctaataatcatacctgtaagtataatcgtggccgtgcatggtggctcatgcctgtaatcccagcactgtggggggccaaggcaggaggattgtttgagcccaggagttggagaccagcctgggcaacataatgagaccccgtgtccacaaaaaatgcaaaaattaaccaggcatggtggtgtgtgcctgtaatctcagctacttgggagtctgagggaggaggatcgcttgagcctgggaggtcaaggctgcagtgagctgtgattgtgccatttcaatccagcctgggtgacagagcgagaccctgtctcaaaaagtctaattgctaagatgtcattgagcctggccctgcaattcacacatgcagaagaaattattgttttcctccttttacagatgagtaaactgaggcacagaggtgttcgggtgcttgctcagtgtgactcacaggggtctccagcgcctgcattgtccgtgctcccagtctacagcatgggagtcagaggagcctggctaggcactggagtgctcggagatgtgccccaggtccaggtggtgggacctgagtgagccagtttgggagtctagactttcggggccgcctctaccaagaggaagaggtggggatgtcttggttaatctatggtctcaaatctctccccactggcctctctcccagcactgctgcagcatttttagagaattctccagccgacactcccctctggaggagctcacccctttctcacctgcatgcctctgcaccggcaggtccttcctcctggacagcccttctttccctggtcagcaaatgccccagggagaatttgaggttgaatcagacaaggccgtggctctgcctcagggcctttgcacgtgctgttctcattcccatctatgggttgctggcattttatcctctattatttatttatttatttatttatttatttatttatttatttatttattttgaggtggcatttcgctcttgttgcccagactggagtgcaatggcacaatctcggctcaccgcaacctctgcctcccaggttcaagcgattctcctgcctcagcctcccgagtagctgggattacaggcacccaccatcacacctggctaattttttgtatttttagtagagacggggtttcaccatgttggccaggctggtctggagctcctgacctcaggtgatccacccgcctcggcctcccaaagtgccgggattacaggaatgagccacatgcccaccctgagtcaccatgcacccccgagacacagtttcttgccttgctgcccaatgaatccatgtcagaccttgaacccacaggaaagaggcctggattgtaggggaacccccaaaccctgccagtcagacgcaggatagcatcctgctagtcaggccgcagtagggctgctcacagcctggcatgtgacatgtgcacacagcccacgtgcctgcccggagtggtccagccactttggccaggtggagctccgcccatcactccccgccatgccccaccaagtgtccccgccttgcctctcaggctgctgggagctaggctgggcaggaaatatgcagatgagcgaagatttgcacatttcttagcctagttccagtccagccccctttatatccggtctcccagcttcctttctcatcctccccccagcttgttcctgcatcagtggccaggaagagcctgggaacacctgcatcacttcagttccctcctctgttcagaaccttccatggctcccacctcactcagggtaaaagccaaagtcctcccacaacccgccgggcacagtggctccctgtcatcctggcactttgggaggccgaggcgggtggatcacttgaggtcaggagctccagaccagcctggccaacatggcaaaaccccgtctctactaaaaatacaaaaaatagccgggcatggtggtgggagcctgaatcccagctactcgggaggctgaggcatgaggatcgtctgaacccaggaggtggaggttgtagtgagctgagattgcgccactgcactctagcctgggcgagagtgagaccctgtctcaaaacaacaacaacaacaaaacaaccaacaaacaaaaccaaagtcctcccacaacccacaaggcccagcatgatcaaccctgtcacctccctggcttgcctcttccttttctttccctcattcactccactccagctgcccctgcctcctggatgcttctctaaacaccaggacacagctccactcaaggacctttgcatgttctgttccctttcccacatatgggcgttgccagtagcccccttttacagataaggaaactgaagaacacccagagaggggactcgccctaatgtagcctagtgaatcagtgtcagatccaagatttgactccagggagcctgatcccaaagcggttgtctctaaagtctcactgggtctccatcagacctggctgtgtgacccaggataaattgctcaacttctctgagccccagtttccttgtttgctccctgagagttcgtggttggtcacagcttgagacccagacatcaggaggtaggttgagccatggagcagcaaacttcagggccttgtcagggcccattccctgtcgaagcccaagggggttttgagctcagcgactccatgtcctgccttggtggaaacgctgcttcagagattgctccaatcaaaggccctaccccagatgcctcgagcacagtacccgccccagtgcctgccagacctgactggtgaggctatttctctccagagcaccaccagccctgactcagctgggtgtggctggggtgcccctgacagctgatcaaacagaggctgagcgtggtggcggggactttggcctcctctgctctactgcgtggagaacacgttgcggacatgaggctggagctggtggaccagggaggaggggctgtactggtccaggttagggatgataggcctggatggggtgaggatacaggggaggtgagaagtcggtgggctctgagcagatggctcactggtggctggacagtgagtccatctgcaagttagagtaagagaggagtcaaaaaccgtctccttcacccacgctgctgcctaatgctgctccctccacgtggaatgctgttccatccactcctcgtctgcctgcacccttctttgtcccttatatctcagcttggacatccctgcctttgcccgctgcctccgccatggaggccccagtcacgccccagttgctgggttacctttctctgtggggttcccagcacctgacatttagtaggagctccataaatactgactttttggttttgctctttttttttttttttttttttgagacagggtctcactctgttgtccaggctggagtgcagtggctccaatatggctcactgcagcctcctcctcccaggctcaagcaaccttcatacctcagtccccaactctgggactacaggcatgcaccactatggccagctaatttttctgattttttttgtagagacaggggtctcactatgttgcctaggctggtctcaaactcttggcctcaagagatgctgccaacttggcctcccacagtgctgggattacagacgtgccctcttttgttttcctgatctgctgctcagagcttgtccccgacctcgctgttggaatcactgtagcatcataatatgcttctgtatctttctgtgctgggtgcagctgcctccagacctttgcacaggccatcccctctgcccagaacatggttcccggactccttaccttaacagactttttttttttggagacagagttttgctcctgttgcccaggctggagtgcaatggcatgatctcggctcactgcaacctccgcctcccaggttcaagcaattctcctgcctcagcctcccaagtagctgggattacaggcatgcgacaccacgctcgactaattttgcatttttagtagagatggggtttctccatgttggtcaggctggtcttgaactcctgacctcagctgatccgcccgcctcggcctcccaaagtgctgggattacaggtgtgagccactgcgccctgccacctaaacaaacttctattcattcttcaggtctgatgcctcttgcaagccttccgtgaccacctctctcccctgtggaagctgggtcaagggctcctctgggctcccgtcccctccagcccctgggtctccccatcgcagtcctgatcaccctcagaataactgtctggttctgtggtgtctgctcctcccattccaatgtcagctccatgaggacagaaatttttctttttcttttttccttctttccatgacagggtcttgctctgtcgcccaggctggagtgtagtgatgcaatcatagctcactgcaatcttgatctcctgagctcaggcaatcctcctgcctcagcctcctgagtagctgtggtcccctcctgggaccacaggtgaatgccaccatgcccagctagtttttaaattgtttgtagagatggggtctcactacgttgcccaggcttttttttggagacagggtcttgctctgtcaaacaggctggagtgccatgacatgatcatagcttactgcaatctccaactcgtgtactcaagcgatcctcccacctcagcctcccaaagtgctgggattgcaggcgtgagccaccaccgttcctggcctctctgccttattcactgctgtatccccaacacccaggacgcagctgtgcatactataggtgctcagtaagagaatgagtgagccagagtagtacagggcctcactggccagaggacctcagtgcctctctgtcccctggtgtccgctattgataccatcagtgtggcaagagcaaccagtcccacagcagggagatagcttccttgtggagagggagtctgcctgggcctcccaaactgagaggtgtcgggggtgatggtgaagagggaggttgagtgaggctgcccactggcccctggtgcctgtggtgaaaatggtgggcccagccagcctaggacacttgccccatcctgcccataggcagaggaccctgctgctacgtggagaattgaggagcaagagcatgcaaggcacatccatgcaacaggcatccgcggagcatctaccatctgcaggcgccgactcaccccgggaggtggaatcatcatcccgggtcaccatcctacaggtgcaggaaactgaggctgagagaggagcagtcaccagcctcaaatcatacaacactggtgtgccaggcacggtggctcacgcctgtaatcccagcactttgggaggctgaggtggacggatcacttgaggtcaggagttcaaaaccaacctggccaacatgttgaaaccccttctctactaaaaatacaaaattagctgggtgtggtggtgtgcgcctatagtcccagctactcgggaggctgaggcaggagaatggcttgaatctgggaggcagaggctgcagtgagctgagattgcgccactgccctcacttcagcctgagcgacaaaccaagattccgtctcaaaaaaaaaaaaaaaaatcacataacactggagtcgtaggactcgaacccacgtctgtcaacttcagggaactctctcctgtggtttttcagatgcatttcggcaattggtgaattacttgagtgaatgaatgggtgtcttgcagtcagtggtgagctcagagtaggaacaggaatgagcaggatttggagtcccgagagacgtggattggagttctggcttggccacacagctggactgcgtgacctggacctctctgggcctcagtttcctcatctacaaagtgggcgcagcaacctcagtgctccactggcacggggccagtgaggtggcgtcaggagagcacaaaaccaagggagacactgacgtgttggattgttttttctgctgtttccggagccggggaaggaagccagaagccaacacagggtgtccaggcctgcctttgggagtttaagttacaaagacaaaagctgggcctagacaggtcagaggggcaggacacaggcttcctgtttttctttgaacagatggcccagccaccagatgcttgtctgtccggacatgtgtgcattgtccaaggaacttgcttctttttaaaatactttatttttagagatggtgtctcactatgttacccagcctggtctccgactcctggcctcacgcgattctcccacctcagcttcccaaagtgttgggattacaggcatgagccactacacctggctgaggccacttttgtgtaaaatatttggaaaaatgtatatatctgtatttccttggttttccagacattctcttcagacttccaagaaactggtgggactggaggacgagcaggagggatgctttgttttttaactgacagatttattgcttagagtcgtgtaaatgacagaagatacagcagacagaggagagtttccacccccgcccagagcagtttcccctattaacaacttgcatcctgctgaacatttgttataattgatgacccaatcttgatacatcattattcatatagtttacattccgatgcactgttcctgttgtacatcctactggtttttggcaagtgcatatgtttttttttttgagatggagtttcgctctgtcgcgcaggctggagtgcaatggcgcgatcttggctcactgcaacctctgcttcctgggttcaagagattctcctgcctcagcctcccgagtagctgggattacaagcacctgccaccacgcccagctaatttttttttgtttgttttgagacagaccctcgctttgtcacccaggctagagtgcaaatggcaggacctcggctcactacaacctctgcctcccaggttcaagacattctcctgcctcagcctccctagtagctgggactacaggtgcacaccaccacgcctggctaattttttgtatttttagtagagacacggtttcggccgggcgcggtggctcacgcctgtaatcccagcactttgggaggccaaggccggtggatcaagaggtcaggagatcgagaccgtcctggccaacatggtgaaaccccgtctctactaaaaatacaaaaaaattagctgggcgtggtggcgggcgcctgtagtcccagctactcgggaagctgaggcaggagaatggcgtgaacccaggaggcggagcttgcagtgagccgagattgcgccactgcactccagtctgggcgacagagcgagactccacctcaaaaaaaaaaagagacatggtttcaccatgttggccagactggtcttgaactcctgacctcaggtgatctgcccatctcagtctctcaaagtgctgggattacaggtgtgagccatcgcacccagccaaattttgtatttttagtagagacggggttttgccatattgaccaggctagtctcaaactcctgacctcaagtgatctgcccgccttggcctcccaaagtgctgagattacaggcatgagccaccgttcccagctatatatatatattttttgggacggagtcttgctctgtggcccaggctggagtacagaggcgcgatctcagctcactgcaacctctgcctcccgggttcacgcccttctcctgcctcagcctcccaggtagctgggacaacaggtgcccgccaccatgcccggcaaattttttttttgtatttttagtatagacggggtttcactgcgttagccaggaggatctcgatctcctgacctcgtgatccacccacctcagcctcccaaagtgctgggattacaggtgtgagccaccgcacccggcttttttttttttttttttttttttgagatggtgtcttgctctgtcacccaagctggagtgtggtggcgcgatctcggatcactgcaacctctatgtcccgggttcaagctgttctcctgcctcagcctcccgagtagctgggactagaggcatgtgccaccacgcccagctaatttgtatttttagcagagacggggttttgccatgttggccagactggtctcgaattcctgacctcaggtaatctgcctgcctctgcctcccaaagtgctggggttacaggcatgagccactgtgcctggccaaggtgcatatgtcttgtatctggtattatagtatcatacagtatcatattcacagtgcacagtatcatattcacagtgcacagtatcatattcgttgtgctaaaaatctgccaattcatctctcccttcccataggccctgggcaatcctgaccttttttttttttttttctttgatacagagtcttgctctgtcacccaggctggagtgcaatggcgcgatcttggctcactacaatcccgcttcctggttccagcgattctcctgcctcagcctccctagtagctgtgattacaggcacataccaccacgcctggctaatttttttgtatttttattagagatggggttttgccattttggtcaggctggtctcgaactcctgacctcagatgatctgcccaccttggcctcccaaagtgctgggattacaggcatgagccaccacgcctggcccactttttttttttttagacaaggtctcgctctgttgcccaggttggagcgcagagtggcacaatcataaactcactgcagcctccatctcctgggctcagatgatcctcccacctcagcctcccaagtagctgggactataggtgtgtgccaccacacccagctaatttttttttttttttgagacggagtatcgctctgtctcccaggttggagtgcagtggtgccatctctgctcactgcaagctctgcctcctgggttcacgccattctcctgcctcagcctcccgagtagctgggactacaggcgcccaccactatgcccggctaattttttgtatttttagtagagatggggtttcaccgtgttagccaggatggtctcaatttcctgaccttgtgatctgcctgcctcggcctcccaaagtgctgggattacaggtgtgagccaccacgcctggcttttttttttttttttctcttttttttgagatggagttttgctcttgttgcctgggctggagtgcagtggtgcgatctcggctcactgcaacatccgccttctgggttcaagcgattctcctgcctcagcctcccgattagctaggattacaggcgcctgccaccacacctggctaattttgtatttttagtagagacggggtttcaccatgttggccaggctggtctcaaactcctgacctcaagtgatccacctgccttgccctcccaaagtgctgggctttacaggcatgagccactcactacacctggccacacccagttaatttttaaaattggtagtagagataaggtcttgctatgttacccaggctggtctccaactcctgaggtcaagcaatcctctcaccttggtctcccaaagggctgagattacaggcatgagtcaccttgcccagcccctttcccccttaataacctccacccaggttgcgtgtggcggctcatgcctgtaatcccagcactttgggaggccgaggcggatgcatcacctgaggtagcgagtttgagaccagcctgaccaacgtggagaaaccccgtctctactaaaaatacaaaaattagctgggcgtggtggtgtatgcatgtagtcacagctacacaggaagctaaggcaggagaatcgcttgaactcaggaggcggaggttgcagtgagctgagatcgcgccactgcactccagcctggtgacagagggagactctgtctctcaaacaaaccaaaacaaaaaaccaaaacacaacaggtagctgggtgtggtggcacatgcctgtagtcccagctactcgggaggctgaggtaggaggatggcctgagcccaggaggcagaggttgcagtgagctgagattgtaccactgcactccagcctgggcaacagagcaagactccatctcaaaaaaataaataaataagaagaaggaaatagtcttggtgcaaagtctagctctgtgttcaaatcttaattttgtcacttgccagctgggaagcccaagtcctgtggggtccaagattttttatctggtgaatgggccttgcaggccccatctcacagagacaaggtgtcctaacaattgagtgaaataaggccagtaaaggggccaccaaaagatggaggttattttatttatttatttatttttttgagacagagtttcaccatgttggccaggatgatctcgatctcttgaccatgtgatctgcccgcctcagcctcctgaagtgctgagattacaggtgtgagtcactgtgcctggcctgtatttccttcttagcacaacctttcagagcaggtggcaatgactttgataaagctctgtcttttagatggaccacattttccttccttccttccttccttctttccttctgtccttcttttctttctttcttccttccttccttccttccctccctccctccctctctctctttctttctttctttctctttctttctttctctctttcttttcttgacagagtcttgccccatcagccaggctggagtgcaatggcatgatcttggctcactgcaacctccatctcctgggctcaagcaattctcctgcctcagcctcccaggtagctgggattacaggcatgtgccaccactcccggttaatttttgtatttttagtagtgacggggtttcaccatgttggccaggctggtctccaactcctgacttcaggtaatctgcccgcctcggcctcccaaagtgctgggattacaggtgcaagccactgcgcccagcctatggaccacattttcttagcccagtagctctgcaaagaaaaggaggtgacatcacgcagtagttagacacccagacacttgagttcaaatcctgcacctcagctcacaacaccagctttaatagacggttgctcacacctgttagaatggctacaatgaaaaataccaacaccaccaagtgctgaggaggattcagggaaactggaccctcatacgctgctggtggggatgcaaaatggtgcagctgctttggaaaatggtggttcttaaaatgcttaccatgcaagccctgtatgacccagcaaacccactcttgggtagtgacctaagagaaatgaaaatggatattgacataaaaacctgtatacggtcaggagtggtggctcacacctgtaatcccaacactttgggaggctgcagtgggtggatctcttgagaccaggagttcgagaccagcctggccaacatggtgaaaccctgtctctactaacaatagaaaaattagctgggcatggtggtgggtgcctgtagtcctagctactcaggaggctgaggcacaagaatagcttgaacccgagaggcggaggttgtagtgagctgagatggtgccactgcactccagcctgggtgacagagcaagactctgtctcaacaaacaagcaaaaaaacctgtacatgagctgggcatgggtacttgggagaccaaagtgtgaggatcacttgaggctgagagttcaaggttacactgagctatgattgcaccactgcactccaacctggggaacatagcaagaccttatctctaaaaaataaactaataatttaaaagcctcagtgtagtgcttcatgcctgtaatcctagcactttgggaggctaagggaggaggatcacttgagcctggagttcaaggctgcagtgagctatgatcacgtcaactgccctccagcctgggtgacagagcgagatcctgtgtctcaaaaaataaaaagtaaaatagaagaaaaggctgtgcatgaatgttgatagcagctttattcatcatcacccatggcttaaaacaatggagttgtccctcagtgggtgaatgtaaaacaaaccagggtctttccctacaatggaatattcttcagcaacaaaaatgagcaaactattgagacaggcaagtacttggatgaatctcaaatgcattatgctgcctgaaagaggccagactgaaaaggccacatagtgtatgattccagttatataacattctcaaaaagacaaaagtacagtgtgagatagcagacagatgagggcctgcctagggctcgggggaggggctgatgacagaggggcagcgccagggagcttcagggggatgcagcagctctgtctgatggccctggtggctcaatgaatctggacatgtgttaaaattcatagaactgtccacctctccgggaggaaattttactgtatttatacctagagagagagacatttgcagggggaatgggtccgtgagattctaggaatgtggttatttatccttgtaaatcccagtcacccctgctgagacaataggggtgacccattgtgcaacctgcagccagccagcccactttgcaaagttttctttctctttctttctttcttttttttttttttttttttttgagacggagtctcactctgtagcccaggctggagtgcagtggcatgattttggctagccgtaacctctgtctcttaggttcaagcgattctcctgcctcagcctccctagtagctgggattacaggcgtgcaccaccactcccggctaatttttgtatttttagtagacacggggttttacattgttggccaggctggtctcgaactcctgacctcaagagatctgcccgcctcagcctcccaagtagctgggactacagacgcataccaccatgaccagctaatttatttttatttttgtagagatggtgtcttgctatgttgcccaggctggtctcgaattcctaggctcaagcaatcctcttgcctcaacctcccaagtatctgggaccacaggagtgccaccacatctggctaattttattatttttaatttttaatttttaatttttattttattttattttttagtatttattgatcattcttgggtgtttctcggagagggggatttggcaaggtcataggacaatagtggagggaaggtcagcagataaacatgtgaacaagggtctctggttttcctaggcagaggtccctgcggccttccgcagtgtttgtgtccctgggtacttgagattagggagtggtgatgactcttaacgagcatgctgccttcaagcatctgtttaacaaagcacatcttgcaccgcccttaatccatttaaccctgagttgacacagcacatgtttcagagagcaagagattgggggtaaggttatagattaacagcatcccaaggcagaagaatttttcttagtacagaacaaaatggagtctcccatgtctacttctttctacacagacacagcaacaatctgatttctctttcctttccccacacttccccgccttccactcgacaaaaccgccatcgtcatcatggcctgttctcaatgagctgctgggtacaccacccagacggggtggcggccgggcagaggcgccccccacctgccggacggggcggctggccaggcgggggctgccccccaccttctggagggggcggctgccgggcggaggggctcctcacttctcagacggggcggctgggcagagacgctcctcacctcccagacggggtggtggtcgggcagagacactcctccgttcccagacggggtcgcggccaggcagaggcgctcctcacatcccagacggggcggcggggcagaggcactccccacatctcagactatgggcggcggggcagagatgctcctcacttcctagacgggatggcggccgagaagaggcgctcctcacctcccagactgggcggccgggcagaggggctcctcacatcccagacgatgggcggccaggcagagacgctcctcgcttcccagactgggtggcggccgggcagaggccgcaatcttggcactttgggaggccagggcaggcggctgggaggtggaggttgtagcgagccagagatcacgccactgcactccagcctgggcagcattgagcactgagtgagactccgtctgcaatcccggcacctcgggaggccgaggctagcaagatcactcgcggttaggagctggagaccagcccggccaacacggcgaaaccccgtctccaccaaaaaaaatacaaaaaccagtcagtcgtggcggcgcgcgcctgcaatcccaggcacttggcaggctgaggcaggagaatcaggcagggaggttgcagtgagccgagatggcggcattacagtccagcctccgctcggcatcagagggagaccatggagagagagggagagggagaaggagaccgtggggagagggagagggagagggagagctctttttaattttttttgtagaggccagagtcttgctatgttgcccaggctggtttcaaactcctggcctcaagtgatcctcctgcctcagcctcctacagtgctgggattacaggtgtgagccactgcacccagctggctatgtggtttcttgtgcatcactctatccctagtgcgctgcacacagcctggcacacagtaggtgctcagtaagtgctttctgagtgaatgattgggagaagcagaaagtattccaagggaggcatgggcaattgtttttttgtgtttttttgagatggagttttgctcttgttgcccagggtggagtgcaatggcacgatctctgctcactgcaacctccgcctcctgggttcaagcaattctcctgggttcaagcgattctcctgcattcaagtgattctcctgcctcagcctcctgagtagctggaattacaggcatgcgccaccacacttggataattttgtattttagtagagacggggtttctccctgttggtcaggctggtctcaaactcccgacctcaggtgatccacatgcctcggcctcctaaagtgctgggattacaggcgtgagcctccgtgcccagccaggcaattttgttaatcgctgaatcttccagtttccacatgcctcctcctctctccaacccttctcgccctaacttttccagattgtgcatgaaatttctagattgtgcatgaatgccctgcccagccctgcacattcagaattcatttgaattgaacctgagaggtggaggttgtaccgagctgagatggtgctactgcactccagcctgggcgacagaccgagactctgtctcaaaaacaaacaaacaagcaaaaaccacaaaaaacctgtacatgagctgggcaaggctgagtgtggtggctcacacctgtgatcccagtgcctccagagggtgaggcgggaggaatggcttgaggtcaggagtttgagaccagcctgggcaacatagtgagaccctgtctataaaaaaaataaagaattagccaggtgtagtggcgcatatctgtggtccctgctacttgggaggctgacaagggaggttcgcttgagcccaggaatttgaggctgcagtgagctatgattgtgccactgccctccagcctgggtgacagagtaaaagacaatagcaacaaaaacgctgaatgaaatacagcaaacatgcttttaagttatcagctaagttcacaaaaaagtaagagaaatctccaaggaacacagaggaggggaagttagtgctgaggcgccacattccttgaccctgtgagataaaggctgcagtgagccgtgttcacactgctgcactacagcctgggcaacagaacaaggctctgtctcaaaaaaaaaaaaagaaaaagagaaaaagaaacctcgtctccaaaaaaaaaaaaaaaattaaaaatcagcctgtagtcccagctattcaggaggctgcggtgggaggatcgcctaatcccaggagctccatgttgcagtgagctgtgatcaggccactgtactccagcctgggtgatagaacaagactccatcccctcccctcaaaataaaaataaattgaaaaaataaagaacaaattaaaacaaggtcattaggatggaccctaatccaaatgaccactatccttataaaatgaggaggtatgggctgggtgcagtggctcgtgcctgtaatcccagcactttgggaagctgaggcaggtggatcatttgaagtcaagagttcaagaccagtctggccaacgtagtgaaaccctgtatctacccaaaatacaaaaattagctgggtgtggtggcgcatgcctgtaatcacagctatttgggaggctgaggcatgagaactgcttgaacctgggaggtggagattgcagtgagctgagattgtgccactgcagtccaacctgggggacagaggaagactctgtctcaaaaaaagaaaaaaaaaaagaaaagatgaggtgatatggacacagagacaagcattaaagaaagactatgtgaagacacagaaacaaggcaactggctctaagccaaggagagagacctcagaaagaatcaaccctgctgacaccttattcttggacatacaccctccggaactgtgaaatgccctgttttataagcttccctgtctgtggtgcttggtcatgacagccttagcaaactcatacacgtcccctcttcccaactgctgcttcctggcatcaccacctctcagacaaagtacttgtattaaatccttgtttcagtggtggcttccacggaacccaaactaagacaaggccaccccagggtacaaaaggtggcatggggaaagaagagagtctctggggagcattgtcatgcagagaaaggaaaggagaggtcttcaaggaagtagagccagacctcagtttcagaagccattgtatttgctcccagaacccatgagaaaaaacttctgctgtggtggtggtggtgaatcccacaataggaagcttctctgtggttttgagccacaaaagaaagttgtagcccattgtttcatggccacaaaggaaatggtttccagttgggtgatggttcgcttgggttgctgggaggatctgacctcaaccttcctgctgcaccctgggcaatggtgcatcttctcttccggcatcttctctctcctgtttttcaagtttactcttttttttttttttttttttttttttttgatacggagtctcactctgtcacccgggctggagtgctgtggcgcgatcctggctcactgcaagctccgcctcctggcttcaagcgattctcatgcctcagcctcccgagtagctgggattacaggcatgtgccaccatgctcagtggctaatttttgtatttttagtagagacggggtttcaccatgttggccaggctggtctcaaactcctgacctcaagtgatccatctacctcggcttcccaaagtgctggaattacaagcgtaagccaccacacctggcccaagtttactctttctaaaaagaatttatttggggtttgctctgttgcccaggttggatgcaacctggtggtatgatcatagctcactgtagccttgaaatcctggattcaagtgatcctcctgcctcagcctcctgagtagctgggactacaggtgtccatcacctgacccagtaattaaaatttttttttgtagagatggggtcttgctatgttgcccacactggtcttgaactcctggcctcaaacaatcctattgcctccaatacatctggcccaggtttactctttttttttttagacagtatgttgctcttgttgcccaggctggagtgcagtggcacaatctcggctcacagcaacctctgcctcctgggttcaagcgattctcgtgcctcacctcagcctcctgagtagctgggattacaggtgcgtgccaccacccccagctaatttttttgtatttttaatagagacaaggtttcaccatgttggccagactggactcaaactcctgacctgaagtgatccacccgcctcggcctcccaaagtgctggaattacaggcatgaggcactgccgctcagcccccaggtttactcttttttttttttttttctttttttgagacagagtttcactcttgttgcccaggctggagtgcaatggcatgatctcggctcactgcaacctctgcctcccggtttcaagcgattctcctgcctcagcctcccgagtagctgggattacaggcatgcaccactatgccctactaattttgttttttttttttttagtagagacgaggtttctccatcttggtcaggctggttgtaaactcccaacctcaggtaatccgcccaccttggcctcccaaagtgctgggattacaggcatgagctgccgcgcccagccaggtttactcttaatttaaggttgagcccctgggctgcacactcagccttgtggatggatgactggctttgggccaaggtttggcttgcagcttctcctcactctcagcctagaggcaaaaacttttctttctttttgttaaaaacagctttactgagatatagtctacacagtatagaattcacccctcgaaagtgtacaattcaatggtttttcctatattcagaattgtacaaccatcacccagcctattttggaacactgtctcatctcctcaaaaagcagctccacagcctttagctatcattcccctatcccctcgtccctgccgcctcacccctaagcaactacgaatctactagtctggactgtcacatgagtgcaatcatacaacatctgtcatttcgtgtctggcttatttcacatagcttaaagtttgtaagattcatctgcagcctgtgtgactgtatcattcctttaaattttgttttaatttttaaaattgagatggaatctcccatgttgtccaggcttgtcttgaactcttcggctcaaacgatcctcctacctcagtctcccaaagtgctgggattacaggcgtgagccaccgtgtctggacattcattcctttttttaatttttttgagacagagtcttgctctgtcacccaggctggagtgcagtggcgctatctcagcccactgcaacctctgtctcctgggttcaagcgattctcctgcctcagcctcctgagtagctgggactagaggtatgcgccaccacgcctggctaatttttgtggttttagtagagaaggagtttcaccatgttggccaggctggtcttgaacacctgacctcaggtgatccgccctcctttgcctcctaaagtgctgggattacaggcttgagccatcacgcctggccgacattcattccttttaaaggctggataatattccattgtatggatagaccacattttatttatccgttcatcagtggatggcccctatggactattgttagcggtgctcttacgccatttgagttacacatttttgcatggacatatgatttcatttctcttgggtacgtatatacctaggagtggaattgctcggtcatatggtaattccacttttaatctttttttttttgtcctgtagaggtggattctcgctggtcttgaactcctggactcatatgatcctcctgccttggcctcccaaagtgctgggattataagcataaaccactgtacccagccctttctgtaattttttttttttttgagacagtttcattctgtcgcccaggctggagtgcagtggcacgatcttgcctcactgcaacctctgcctcctgggttcaagcaattctcctgtctcagcctcctgaggagctgggattacaggtgctcaccaccacgcccggctaattttttgtatttttagtagggttttagtagggtttcaccatgttggccaggctggtctccaactcttgacctcaggtgatccacccactttggcctcccaaagtgctgggattacaggccgtgagccaccgcacccggccctatgtgtaacctcttgagaagctctcagactgttctccaaagctgttgccccagctgacattcccaccagtggtgtatgagggttctgatttctttgtgtccttgtgtgaaaatacttctttaaccaattttacagataagactaaaatatactgaggcccagcaacgagctcaagctcccacagctactgagacacagagctggggcaggtgcccaggtatccagactccagacatcaggatttgctcatttcattgaggctttaacaaagactctgtggatctttattgagctcctgttacataccaagcactgaagacacacagtgaacaaaccaatgtagaaaggactcagatagcttaaaataataataggccagtgcccagtagcatacacctgtaatcccagcactttgggaggtcaaggcgggatgatcacttaagcccaggagtttgagactagcctgggaaacatggtgaaaccccatctctacaaaaaatctaaaacttagctggtcatgggtcaggcactcccaaagtgcagtgctcccactgtactccagcctgagcgacagagcgagactccttctcaaaaaaaaaaaaaaaaaaaaggttagctggtcatgatgggggcacatgcctgtagtcccagctattcaggaggctgaggtgggcggactgcttgcgcctggggaggttgagacagtagtgagccaagatcacgccactgcattccagccccagtaacagactgagaccctgccttaataaaaaggaaaaaaaaagttaaaaatttaaaaaatatttgaattcaggatggcagggactacatctgtattttttggcatcacaattggcatacactaggtgctcaatggatgcttattgaatgaaaggttgaatgaattagtgaatgagcagatgtcacccatcagaaagaatcactgaccttggagtcaggagacccatcttcaaatctgggctcctctgttccaggcaatgagcctcatctgttttttgttttttgagacagagtcttgctctactgcccaggctggagtgcagtggtgcaatcttggctcactgcaacatccacctcccaaggtgaatcaattctcttgcctcagcctctcgagtagctgggattacaggcatgcaccactgtgcccaggtaatttttgtattttttgtagagacagggttttgccatgttgcccaggctggtctcaaactcctgacttcaggtgaactgcccacctcagcctcccaaagtgctgggatgacaggtgtgagccaccgcacccggccaagcctcatttgtaaagtggacatgacaatagcacctacctctaagcatgggagtgaagattctagatcattctagcacctggcatgaagtaaaggcttcaataaatgtatacaccaactctcccagatcttctgaaagagaagcacagaaaacagtctgaacacagcctggaaggagaattcctgtgctgggtgggttattttccatgaaccccgaggacctggctaagtttcaggtcagagctgtttttttttcccccaaaattctctcatttgctctggtccaagtggagatcctggttcccagtgtcccccctgcccccacccccttcccgccaggcgcagcagggagcgtccgctgagacagcaagaaaacccacccaagaatgcagaggcctcagctgaggacagcacttgtaattcagcttggtcaccctttaaaaacaattgtaaggccaggagtataatcaatgtactcgtgcctgtaattccagctctttaggaggctaagatgggtgaatggcttgagtccaggagtttgagaccagcctggccaacatggtgaaacaccgtctctatcaaaaataataagaataataggccgagcacggtgactcacacctgtcatcccagcactttgggaggctgaagcgggcggatcacctgaggtcaggagtttgagtccagcctggccaacatggtgaaaccccatctctactaaaaatacaaacaattaacggggcgtggtggcacatgcctgtaatcccagctacctgggaggctgaggcaggacaattgcttaaacttgggaggcggaggttgcagtgagctgagatcgcgccattgcactccagcctggacgacagagcaagactccctctcaaaaataaaataaaataataataataaaggcagatctttttttttcttcttggtctttttatcctattatagtaataataactgcatagtgcatgctgagataagaggcagtggtcgctccaatcactgcctcttctgatgtctcgtggcctcttcccttctgtgtctaaatgttcctctcctctctttctctctctctctcttttttttttttgagacagagtctcgctttgccgcccaggctggagtgcagtggcgcaatctcagctcactgccacctctgcctctcgggttcaagcaattctcctgcctcatcctcccgagtagctgggagtacaggcgtgcaccaccacatccggcatatttttgtattttagtagagacagggtttcaccatgttggtcaggctggtcttgaactccagatttcaagtgatccaccttccttggcctaccaaagtgctgggattacaggtatgagccaccatgcctggctggatttttcaagagacgcctcaaatccagacttctccattgaaaatattttgaatttttattttattattatttcttttagacagagtctcactctgttgtccaggctggagtgcagtggtaccatcatggctcactgcagccttgaccttctgggctcaagcggatcctcccgcttcggcctcccaaagtgctggaattacaggtgtgagccaccacagcttgccttgttttttttttttttttgaaactgggtctcactgtgtcacccaagctggagtgcagtggcacgatttcagctctttgcatcctctgcctcccaggttcaagcaattctcttgcctcaggctccagagtagctgggaccacaggcgtgcaccaccacacctggcttattttttgtatttttggtaaagacagggttttaccattttgcctaagctggtcccgaactcctgggctcaagtgatcctcccaccttggcctcccggagtgctgggattacaagtgtgagccaccgcgcctggcctcgtgccttgatttttttaaagtcaaagtcaccagcaagccatgaacattatctctcttcttaaggaagaaagggaccagggtggtggcctaggcaacatagggagaccccgtctctacaaataatatatatataaaaaaaaacaactagctgggtggggtggtgcatggctgtggtcccagctactagggaggctgagctgggaggatcccttgagcctaggagctggaggctggactgagctatgatggagccactgtactccagcctgggcaacagagtgagaccttgtcaaaaataaaaaataaaaaaataaaaaataaaaataaataaaaaaaggaaggaaggaaaggtctccttcaccggatgtgaacccttttcccaaatcttgtgctgtgtttctcagcccccacaggcagctgaaatatgtcatcacccacccactgcttcctgtctgtgttagatttttgggagctgccataacaaatcatcaccagcttgctggtttaaaacaacaagaatttattcttttattttttgagacacagtctccctctgtcgcccaggctggagagcagtggggcgatcttaggtcactgcaaccactgcctcccaggctcaagcgattcttctgcctcagccttctgagtagctgggattataggcatgtgacaccatgcccggctaatttttgtatttttagtagagacagggttttgccatgttggtcaggctggtctcaaactcccgacctcaggtgctccgcccgccttggcctcccaaagtgttggaattacaggcgtcagccaccacgcccagccccctaaaatttattctttcactgttctggatgccagaagtctgaaatcaaggtgtcaacagagccgtgctgcccccaaaagctctggggaaggttccttccttgcctcttccaacttctggtggcccctggtggtcgctggattgtggccacgtcactccaatcactgcctcttccatcatcttgtggccttctcccctctgtctgtgtccaaatgttcctctcctgtctctctttctctctctcatttttttatgagacagagtctcactctattacccaggctggagtgcaatggtgtaatctcagctcactgcaacctctgcctcctgggttcaagtgattctcctgcctcagcctccctagtagcctggagtacaggcgtccaccaccacaaccagctaatttttctatttttaatagagagagggttttgccatgttagccaggctgacctcaaactccttgcctcaaaatccacccacctcactctcccaaagcactgggtattacaggcatgagccaccacacctggcctcctttttttttttttttgagatagagtcttgctctgtcacccaggctggagtgcagtggcgcgatctcggctcactgcaagttctgcctcctgggttcacgccattctcctgcctcagcttcccgagtagctgggactacaggcgcccgccaccatgcctggctaattttttttgtatttttagtagagacggggtttcaccgtgttagccaggatggtctccatctcctaatcttgtgatccacccgccttggcctcccaaagtgctggaattacaggtgtgagccacagagcctggtctttttttttttttttttttttttaaccaacaaccttatttatttatttttgagacaaggtcttgctctgttgcccaggatggaatgcagtggcaccatcatacctcactgcagcctcgacttcccaggctcaagacatcctcccaactctgcctctagagtggctagtactacagatacacgccaccatacctggctaatttttatttttttagagacagggtctcgatatgttgcccgggctggtcttgaactcctggcctcaagcctcctgtctcctctggtcttgccctcccaaagtgctgggattacaggcatgagccaccacccctaacccctctcctatgtcttataaagacaccagatattgaccagatattggatttaggacctgacctaaatctaggctgacttcatctcaagatgtttaaccaatgacatctgcaaagaccctgttttcagatagggtctcatctgaggctccagatggatatgaattttgtggtgacatgacttaacccactgtggtgctcacggtaaccagagctggacatgaagttctacaggaactgcgagaacattagcaggtaccgggccgagtcatttccctctattcccaccaggaggccttgtagtcctgttccttttacaacatttatttcttttctactgtggcaaaatatatataacttaaaattttgtcattttaaccattttaagtgtacagttcaggccgggtgtggtggctcacacctgtaatcccagcactttaggaggctgaggtgggcggatcacttgaggtcgggagtttgagaccagcctgggcaacatggtgaaaccccgtctctactaaaattacaaaaattagccgggcatggtggcacgctcctgtagtcccaggtactcaggaggctgaggcaggagagttgctcgaacccagtagatggaggttgcagggagctgagatcgcaagatcacgccactgcactccagccttggcaacagagcaagactctgtctcaaaaaaaaaaagaaaagtacagttcagcagcattaagcacattcacatcgctgtgcagccatcaccaccatccgtctccagaactttctcatctttccaaactgaaactctatccccatgaaacactcactccccacgctcctctccattccctggtacccaccattctgttttctgtctttatgaatctgatgactctagggacctcaaatgagtggaatcatgcaatatttgtcttttttttttttcgagacagagttcgctctgtcgcccaggctggagtgcagtggcgtgatctcggctcactgcaaactccgcctcccgggttcacatgattctcctgcctcagcctcccaagtagccaggattacaggcgcctgccaccacatacagctaatttttgtatttttagtagagacggggtttcaccatgttggccaggctccaaactcctgacctcaagtgatctgccagccttggcctcccaaagtgctgggattataggcatgagccaccgcgcctggctcccgttgtcaattcttttagttaagaatttgagcaggtgtggtggctcatgcctgtaatcccaggattttgggaggctgaggcagccagatcacttgagtccaggagttcaagaccattgctagagcctgtctctaccaaaaatggaaaaaaaaaaaaaaaaggcaggtgcggtagtgtgtgcctgtagtctcagctactcaggaggctgaggcgggaggatcacttgagccctggagtttgaagctacaatgaactatgatcacatcactgcactccagcctgagcaacaaagtgagatccagtctgcaaaaaagcaacaaagatttctgcattcattttctcagcttttgagcatcttttcctctagttggacaatcttatacttaatcagctactaatactttcaaagggcatttaaggccgggcacgatggctcacggctgtaatcccagcactttgggaggccgaggcaggtggatcacctgaggtcaggagatcgagaccagtctggccaacatggtgaaaccctgtctctaccaaaaatacaaaaattagctgggcatagtggggcatgcctgtagtcccagctactggggaggccgaggcaggagaattgcttgaacccaggaaatgaaggttgcaatgagctgagattgcaccactgccctcggcctgggcaacagagtgagacttcgtctaaaaaaaaaacaaaaaaacaaaaacaaagggcacttaagttgttgtttccaatcattcacaagtcaagcgaggcttaagagcaggcattagcaaaactacattctgccacccatttttgtaaataacaaaaccatctcatattataaataacattttattttgacagagtcacacttgttcatttacatatatttacatattgtccatttacatattttctatggctgcaatagcagagtcccaacagagacggtatggtccgcaaagctgaaaatatttactttctggctctttccagaaaaatctgccagctcttggcctatgtgcatttgaataaatctgtagtaggaattcctagaaggagaaacattccccacaaggttttaaaagtccatttgcggttgttacaggtccgcctgtaataaaatctccaaaagctatttatgaggtcttttttttttttttttgagacagagtctcactgtgttgccgaggctggcgtgtgcagtggcaagacctcggctcaacgcaacctccgcctcccgggttcaagcgattctcctgcctcagcctcctgagtagctgagattacaggcatgcaccaccatgcccggctaatttttgcatttttggtagagacggggtttcaccatgttggccaggctggtgtcaaactcctgacctcaagtgatccgcctgccttggcctcccaaagtgctgagattacaagcgtgagccactgcacctggccaaccttttcaatgtgtttaagtgagatacttgaggaatatgggatgggaacagtcttggccaccctgggaccagctgcccagacaacagagggaattagaacccgatcccccatgctaacaagaacagaagccccctcgagatgtgtcacctgcatgcactggtctggggccactcgctgcttcctgaactctcatcaggaccctccagtcctcctaacccttcaaggttgatacccctgaaaccctcccttctcatcactgcctgggtataccttatatactaaatatttttaatattatcaaggatcttggctgggtgtggtggctcatacctgtaatcccagcgctttgagaggctaagtcaggaggattgcttgagcccaggagttcgagaccaatctgggaaacatagcgagacccctgtctccacaaaaaataaaaaaattagccgggcgtggtggcacgtgccattggtcccagctactctaaaggccaaagcgagaggatcgcttgagcccaggagggtgaggttgcagggagctgagatcacactactgtacttccagcctgggagacaaagcgagaccctgtctcaaaaaacaaacaaacaaacaaaaacccatctcctggttctccttaatttcacttccctcttttccagccagaagctaaggtagctgaaggggtagaaattgcagatctttctttatgtagcaagagagaggaactgggaaagcagtgagtgtccctgtaggacaggggtcttcttattttattttatttttttgagacagagtctcgctttgtcgcccaggctggagtgcagtggtgcggtctcggctcactgcaacctccatctccccagctcaagcaattcttctgcctcagcctcctgagtagctgggattacaggtgcccacctgtaattaaccgcatccagctaattttgtagttttagtagagacggggcttccccatgttggccaaggctggtcttgaactcctgacctcaggtgatccacccgcctcggcctcccaaagtgctgggattacaggtgtgaaccactgtgcctggcctgacaggggtcttctgatcactcctcagtgcctcccaacccaccatacagagcacaaagtgttaaccctaaggcagaatgtgaacatggggaaacaaatgcaattttaaaaaacaaccagccaaacaaaaaaatccctaatggtggaaatgctgtttgtttttttttcatttggtagcaatgattaccatcatgctcctctcctgccacaatgacgtcagcccctgatgctgaaacttggtgacacttctgtgcttgtccccagtgagggctgaggtgcacaacctgggaactcctagaacaagtgactgatgccaaaggtgtggaccagcctctgcaaggacagacacctttcttttgtgtgtcccagactttttttttggatggtggattctgatttgcctccttccccaacgatggctattaaaatacctgaaaccataaaatgcccctttgtcaaggatggatctaggttttgtgaggcgtaaacaaatacatttctgccgcaaagtttacatgaacaagtgagcaggcgaacctactgccgcgctcctctctgaccttgaagggtgggcgcaagctcaggtctcattcattcactatttgttgttcagtgctcccaaacacccaattgttgcccttgacaacaaacacatgaatttaagaagaggagttcaggccaggcacggtggctcacgcctgtaattccagcactttgggaggccgaggggggtggatcacttgagatcaggagtttgagaccagcctggccaacgtggtgaaaccccatctctactaaaaatacaaaaattagccgggcgtggtggcgttgcgcctataatcccagctactcaggatcctgaggcaggagaattgcttgagcctgggaggcagaggttgcagtgagccgaaatcgcaccactgcactccagcctgggcaacagagaaagactccgtctgaaaattaaaaaaaaaaaaaaaaaagaggagagtttgttgactaatatgggtcgttgacataaatattctgtgtgtgattgtattcaacacatttcattttttggttgtgattttttttttttttttttttttttgagacggaatctcgctctgtcgcccaggctggagggcagtggcgcgatctcggctcactgcaagctccacctcccgggttcacaccattcttctgcctcagcctcccgagtagctgggactacaggcgcccgccaccacgcccagctatttttttttgtattttttttagtggagacggggtttcaccgtgttagccaggatggtctcgatctcctgaccttgtgatccgcccgtctcggtctcccaaagtgctggcattacaggcgtgagccaccgcgcccggctggttaattgtgctttttaaaaaatatctcccatccccataaatatgtacacctactatgtgcccacataattaaaaattaaacaattttaatcccctaaaaataaaaaaggagaccaagcatgtggagaaataaatgtctcaacacaccataagggtgtattggagtggcccttctatgattttgacaatgatattaaacgtcctggccgggcgcggtggctcatccctgtaatcccagcattttaggaggccgaggcaggaggatggcttgaacctaggacttagaggtcagcccaggcaacatagcgagaccgcgtctctacaaaaaaaaaaaaaaaaaaaaaaagcaagtatcttgcatttgcaattcgtcggatgcctgcaaagttccgtgggtgtgtgatgtaggaatctggggcacgggaagttattcttgcttcatttcctgacgctgaccggctgggcggggtccctggggcacccgggcacatttggacgtgtttggcagggagagtcctggcccagccccggcacgtagggccgcgcttccacgggccgccgccaggagacgcgcgaggctgtagatgcggctttgcagagaagctgggagggtagaggggctggggcggtcgaggggcggggctgcgtgcagccggcccagattcctttccggccagttccttccaggagctgctcccacgtctacagcgccgtctgctactcacccagctctcttgtatctgagcctcattttcccaccgtcctttaagcccgttttcccactgctcatttgcagccaagtttccatctcgcatctttgcgtcccccttctctgcaccctcctttgcacccccattttcctgctttcccttgagtccacatttcccagacctcctttgccccctacattttccaatgctctcttgcatgcccatttatcaccctcttttgtgcccccatttccaggccctcagcccctggttctgaggttccttacttcaaatgaccttttttttttttttttttttttcctgaaacggaggagtctccctctgtctcccgggctggagtgcagtgatgtggtctcggctcactgcaacctccgcctcccgggttcaagagattctcctgcctcagcctcccgagtagctgggactgcaggcacccgccaccacaaccggctaattttttgtatttttagtagagacagggtttcactgcattagccaggatggtctcgatctcctgacctcgtgatctacccacctcggcctcccaaagtgctgggattactggcgtgagccaccgcgcctggcttcaaatgacctcttaaataaaggtgtggaaggacacactcctggctgtgaacagcacccgtggtccaggaggagacagcactcctctgtgaacatcttgcttagttctacatgttccaagaagcaggcgatttgacagacattcattaaattaattaaagtgtaaggtattttctcccatttgaaccatccgccttcccccaatccatgcaggacctggacccagacacaccccagcccagggctggacagagaggggatcggggtggggcaatgtgaagctgctatggttagggtggggaggtatgggggcaaagtgggctacagactgcaggatctaggcctggaggtcttcagtgctgacatacagaaggtttttggtcctgaaatgctaactacatctatcaccatggagaaaagcccaatgacctgctacttgggaggctaaggtgggaggatcacttgagccagggaggtcgtggctgcagtaagccatgatcacaccactgcactccagcctgggcaatggagcaagatcctgtctcaaaagaaaaaaacccagtgaccaatggctcacagttccaggactctctgccttacaggttcctgccctcatgttactcttggggcttcaaagcctggtcttgcttcctgtgtggcctcaggcagttcccttggcctctctgagccctgtatgaaggatgggccaagtatgggcttgggcttgggaggcccggtggcttgtagctagatttctgcatcacagagcctctggatccattcattcattctccgcgggtttcttaagtactgcagtgccaggctttggggacacagctgtttttgtttttgttttgttttgtttgagacagagtctcactccgtcaaccaggctggagtggaatggcacgacctcagatcactgcaacctccacctcctgggttcaagtgattctcctgccccagcctcccaagtagctgggattataggcgtgtgccaccacacccaggtaatttttgtattgtttgtattgttagtaggtctcaaactcctgacctcaggtgattcgcccgtctccgcctcccaacatgctttgactacaggtgtgagccactgcgcctggcaggggtcacagctgttaataggacagcccaagttcccccctcccccgcttggatcccccagtctactaggagatgtcaactgtgcaagtggttagctctgggcactatgcccacagggtcctggtggcatctggagggtaccagggtagcataccatgcctgttctctttccctgctgtgacctgtttgaaggatgaggagccaacagggggcagtttggggcacctgatttccctggaccatgagccttgctccagaacccaattgtgatgtgataaaaggcttatgaccagggcagggggcagctgctgggccgccttggacaaccatcaggcagccaggacacagaggggcagagcaagtcagcattggcgccccttcctcagatccctatcatcttgggaaacagtagcccagaggttcaggaagatgttaacttaaatgttcagggtgccccagtctgttcagcatggctgaaatccacactccgtattcttccttgaagaaactgttatctttactcaatggcttcgtggctgtaagtatgtcacaatccaggcccctggtttgttgcagcccttcctccacagtcagctccctgaaagacagaaataagttgatccaaattggcatcgagatctgtggttccctggagaagcaggagggatgtagggcagacggaggaggaggagcagggagcgtggggacctccatcaaccgagagctggtgaaatccagcacagatgagtgtgatctgggggagcccaggtgggtgatggaagagcttggctctaagtcaaatcctgtagccgaccaagttgtttgggaaggccaggagaaagggttattttcttgatcttttaaatttgtcacatttttttccttaccgtaaaagtaacccgaaatgtacattgctaaggaattgtcaggccgggggcgctggctcatgcctgtaatcccaacgctttgggaggccaaggcgggtggatcacgaggtcaggagttcaagaccagccttggtcaatatggggaaaccccatctctactaaaaatacaaaaaaattagatgggcgtggtggcacgtgcctataatcccagctactcaggaggctgaggcatgtgaattgcttgaacctgggcggcagaggttggcagtgagccgagattgtgtcactgcactccagcctgggcaacatagcgagactctgtctcaataaaaaaataaaagaataaaaacataaaaagaagtaattgtcttcattgtagcatagtctaaggaaaagctgccaggaaagagaaggaaatgaaatatcactcctcctcttcacttgtaacattttaaagagaattaaggccggctgtggtgactcatgcctgtaatcccagcactttgggaggccgaggtgggcagatccattgagccaggagctcgagaccagctatagtgagatccccatctctatttaaaaaataataatacaaaataaagtgttattggaacatggccgtgctcacttatttggagattgtgaacagctgcttttgggctacaccaatagaactgcgtagtttcaacagacaccttaagtcctgcagaggccacaacatctgggtttttcagaaaaaaaaaattgctaatccctgtcctatgacattattttattttattttattttattttattttgagacggagtcttgctctgtcacccaggctggagtgcagtggcatgatctcagctcactgcaacctccacctcccaggtttaagcgattcttctgcctcagcctcctgagtagctgggattacaggtgcccaccaccacgcccggccaatttttgtatttttagtagagacagggtttcgccatgttggccaggctggtctcgaactcctgacctcaggtgatccacctgcttcggcctcccaaagtgctgggattacaggtgtgagccactgtggctggcctattttattttttgagacaaggtcttgatctgtcatccaggctggagtacagtggcacagtcatagctcactgcagtctcaacctcatgagctaaagtgatcctcccactgcagacacctgagtagctgagactacaggcacgcactactactggctattttttttttgttggggagagggtacagatgaggtcttaccaagctggtcttgaactcctgggctcaagtcttggccttggcctcccaaagtgctgggattacaggcatgagccaccgcactcacccagttctatttgtatacaactaacagattacttttcttcctttctggtttctgttctaaaggtgtctggcatcatcctagttggcctgggcattggtggtaaatgtggaggggcctctctgacgaatgtcctcgggctgtcctccgcatacctccttcacgttggcaacctgtgcctggtgatgggatgcatcacggtactgcttggctgtgccgggtggtatggagcgactaaagagagcagaggcacgctcttgtttgtaagttggatctgcacacagaccccagaactgcctccccacacacacaaatcttttattgtgcgtgttgcaaacaactttgcttggtgtcacctattttttttttttttgcggggacagggtttcactctgtcgcccaggctggagtgcagtggcacaatcttggttcactgcaacctctgcctcccaggttcaagcgattctcctgcctcagcctcccgagtagctgggattacaggcacccctaccatgccctgctaatttttgtatttttagtagagacgggattttgccatgttggccaggctggtcttgaagtcctgacctcgtgatccacccgcctcggtctcctaaagtgctgggattacaagtgttgagccactgctcccggtcgaattgttttaaactggagaggccagggtggcctggggtggagggtcgggggaacagagacaacccctcacctgcagggtataaggtcgggaggaggctgagcaggctcccaggccctctctccccgtgtgtcttttagtgcatcctgtcaatggttattgtcctcatcatggaagttacagctgccacagtggtccttcttttctttccaattgtaagtacagccctgctcctcccacatagcattagaaagataaagaaccaaggacgggcacagtggctcacgcctctaatcccagcattttgggaggctgagtctggtggatcacctgaggtcatgagtttgagaccagcctggccaacatggtgaaaccccgtctctaccaaaaatacaaaaaattagccaggcgtgatagcacgcacttgtaatccagctactcaggaggctgaggcaggataatcccttgaacccgggaggcagaggttgcagtgagccaagattgcaccactgcactccagcctgggcaacagaatgagactccgttaaaaaaaaaaaaaagatatagaaccaatagaagtccgcccctccccgccaggcacccatgatcgattgtggggacccagtgatggaggggcccatcacacgtgccacctttgatggtgtgagaagctgaaatcctcagcctgcctctccaagtcctcacaaaacctgctgagttcatttagttcatccctcttgggtttggtggcaggagaaggggagatgatcagaagtgtttgcatattgattggggttttgaaatgtattcaaaatagagggacaatttagcaaaatccatccaaatgacaaaagcttcagcactttgacctggcagtcccatctctgggaattattcaagaactcacttgctggtgtgcagaatcacattcatgccagggcatgtgaaagattgcaaagagggccaggtgcggtggctcacgcctataatcccagcactttgggaggccgaggcaggtggatcacctgaggtcaggagttcgagaccagcctggccaacatggtaaaaccccgtctctattaaaaatacaaaaaaactagccaggcctggtggcacatgcctgtaatcccagctattcaggaggctgaggcaggagaatcacttgaacccgggagccagaggttgcagtgagctgagattgtgccattgcactccagcctgggcaacaagagtgaaactctgtctcaaaaaaagaaaaaaaaaaaaaaagaaaagaaaagaaaaaagaaagattgcaaagaacctagtgagtatgaataagggtttaggcaagttaaaatacatcgacacagtggaatcctgtacatcaggtacagggaaggaggcggctctctgggcaccagatggaatgctctccaggatagagtgccgtcctcattggcatcctccccagaggctgaccctgaaacaataattcaaaggcatgtggtttatttgagaggtgatcccagaaaacacctgcaggggacatggcaaatgaggcaggtaagggaagacagcccacaaaaggggatgctgggcacagcatagaacatgcacctaggttattccactcaagtggagagggagctgggatattgatccaccaactccaaccagccattgatggagggctgctcccagggggcatgtgggctcagaggccagagaatcctcacttgctggcactagggagtcaggccagtaggcacagaactgacaagggccacagagttatgggcaggccaccaagagcccctgctactcctgtcgagaacagccagacgcagaaaaatgagtgcagcataaaccaaagaggaagaatagtgaaaatatactttgctttgacacacatagaagaacatctctttggggacacaggaaacagttaacagtcattggcatggagtgggaggaaacttttggctgggaggaaggggtgggagagagacttttcatggtctgttctcctgtgcatgtcaatttcgaaccacgtgcctctatcatcgctttgcaaaaggattttttaaacctttatttaaaaaacagaaaattaaatgtgccccttttgtgcagacagagattccgtggaagatgatattcaattctttaatggagttacagccacatcgtgggtgcagcagggtgtaggcgattccaaagagcagatgattcaaattcgtgtgcgatgggtacagagagatacgcttggctccagacccacgcgtctccctgtttccctctcttgtggtgggggcacagtagccttcgtgtgtcttcctctagcacagacccctgagctgagggtaggaaaaatgaaggcagcacgagggacgctcccacctcccactctatcctcaagaacctcggccaatgaacgggccactcttgctagttggggtactgatcacttcctgtcctctctgtgaggttggagatgtggccttggaacacaccttcgtgaccctgaggaagaattacagaggttacaacgagccagacgactattctacacagtggaacttggtcatggagaaggtgaggcttacttaaaaaaaaaaaattgtggtgtaaaggtacacaacatgggcgggcgaagtggctcacacctgtaatcccagcactttgggaggccgaggtgggaggatcacttgaggtcaggagtttgagaccagctgagccaacatggtgaaaccccgtctctactaaaaatacaaaaattacctccgtgtggtggcaggcatctgtagtctcagctactcaggaggctgaggcaggagaatagctcgaacccaggaggtagaggttgcagtgagttgagatggcaccactgcatcccagcctgggcgacagagggaggctctgtttaaaaaaaaaaaaaaaagccagtcacagtggcacatgcttgtggtcccagctactaaggaggctgaggtgggaggatcacttgagtccaggaagtcaaggcttcagtgaactatgatggtgccactgcactctagcctgggtgacagagcaagaccctgtatcttgtaaacatgaaatgtatcgtttaacatttttttttttttgagttggagtctcattctgttgcctaggctggagtgcagtggcgcaatctcagctcactgcaacctccacctcccaggttcaagcaattctcctgtcttagcctcccaagtagctgggattagaggcgcccaccaccacacctggctaatttttgtatttttagtagagacggggtttcaccatatgggtcaggctggtctcaaactcctgacctcaggtgatccacccgccttggcatcccaaagttctgggattataggcgtgagccaccgtgcccggccccatttaacaattttgaagtgtgcagttcagcggcattaagcacattcgcattgttgtgcgaccatcaccaccatctctagaacttccttatcttcccaaactaaaactctgtcccatgaaacgctcactccacattctccctccccaagcccctggcacccaccatgctcctgtctgtctatatgaatctgacgactctagggacctcctaggagtgaaatcaggcagtgtgtgtctttactaaaaatacaaacattagccaggcatggtggcgtgtgcctgtaatcccagctactcgggaggctgaggcaggagaatcgcttgaatccgggaggcagaggctgcggtgagccaggatcatgccactgcattgcagcctgggcaacagagtgaggctccatctcaaaaaaaaaaaaaaaaaaaaaaagggatttgctagattctatggcaattctgctttgtatatatacatatatatttatatacatatgtatataaatatatatatacacacatacatatatatatacacatacatatatatatatatatatacacacacacacacacacacacacacacatacatatatatattcacatatatatttttgagacaggatctcactctgttgcccaggctggagtgcggtaaggggatcatggctcactgcaacctctgcctcccaggctgaagcaaccttcccacctcagcctcttgagtagctgggactgcaggttcgtgccaccatgcctggctaatttttttttttttttttgtagatatggggtttcaccatgttgctcaggctgatcttaaaaactcctggcctcagccgccccgtccgggaggtgaggggcgcctctgcccggccgcccctactgggaagtgaggagcccctctgccccgccaccaccccgtctgggaggtgtgcccaacagctcattgagaacgggccaggatgacaatcgcggctttgtggaatagaaaggggggaaaggtggggaaaagattgagaaatcggatggttgtcgtgtctgtgtagaaagaagtagacatgggagacttttcattttgttctgtactaagaaaaattcttctgccttgggatcctgttgatctgtgaccttacccccaaccctgtgctctctgaaacatgtgctgtgtccactcagggttaaatggattaagggcggtgcaagatgtgctttgttaaacagatgcttgaaggcagcatgctcgttaagagtcgtcaccactccctaatctcaagttcccagggacacaaacactgcggaaggccgcagggtcctctgcctaggaaaaccagagacctttgttcacttgtttatctgctgaccttccctccactattgtcctatgaccctgccaaatccccctctgtgagaaacacccaagaatgatcaataaaaaataaataaataaataaattaaaaaaaaaaaaaaaaaaaactcctggcctcaagcgatcctcctaactcagcctcccaaagtgctgggattacaggggtagccaccacactggcctacgttttttgaggaactgccagactcctttccacagtggctgcaccattttccattcccatcagcaatgcaggagtctaatttctccacgtccttgacacctgtcattttctgggtttgtttttttttgagatggagtctcactctgtcacccaagttggagtgcagtggcgcaatcttggcccactgcaacctccgcctcctgggttcaagtgattgtcctgccttagcctcccaggtagctgggattacaggcgtgcactaccgtacctggctaatttttgtctctagtagagacaggacttcaccatgttggccaggctggtctcaaatttttgacctgaagtgatccacccaccttgacttcccaaagtgctgggattacaggtgtgagccaccgtgcacggccaattttctgttattttgatcattgccatcctaatgagtgtgaggtggtgagactcccatcttgattcttggcatttaaggagcaagactggcctttaagtgttatttaagcttttgagacaggtggttgaggccaggcagggagggttcaaagtggggaaagccattgcctgtctccaggagcatttcacacctgagttgtaggtccaggagctgctgtgggttgatggccaggctttgaaaggaacatgtgatagggaacaatttatttatgtacttaagacagagtcgtactcccaaaactcaggctggagttcagtggcgcaatctcggctcactgcaggcacaacttcccaagctcaggtgattcttgtacctcagcctcccgagtagctgggactacaggtgcacaccaccacacccagctaatttttaaaatttttatttttatttatttattttgagatggagtctcgctctgttgcccaggctggagtgcagtggcatgacctcggctcactgcaagttccgcctcccaggttcatgccattctcctgcctcagcctcctgagtagctgggaccacaggtgcctgccatcacgcccggctaattttttgtatttttagtagaaacggggtttcaccatgttagccaggatgatcttgatctcctgacctcgtgatctgtccgcctcggcctcccaaagtgctgggattacaggcgtgagccactgtgcccagcctaaaatttttagtagagacctttcagcatgttgcccaggctggtctcgaactcctgggctcaagtgatctgcctgcttagtcttcctaaagtgctaggattatagctgtgagccactgcgcccagcttcatttattaaaaaaaaaaaagttttgctccctgtgttgcccagactggtcttgaactcgtcgcctgaagtgatcttcctgaattggcttctcaaagtgttgggattataggcatgagtcactgcaactggctgatgcctttctgcatgctgcttttggcttctcaagcttgtgatggtacagaatgtctctctttcattcattcatacagtcctcccactaatatttattgagcacctgctatgagtcaggcactctatagggtttttgttagggtacaaaaaaaatccttgttggtgctgggcgcagtggctcatgcctgcaattccagcactttgggaggctgaggcaggtggatcacctgaggtcagcagttcgagaccagcctggccaacatagcgaaaccccgtctctactaaaaatacaaaaattagccgggcatggtggtgcatgcctgtaatcccagctactcgggaggccgaggtaggagaattgcttgaacccaggaggtggaagttgcagagagccaagatcgcgccattgcactccaacctgggcaacagacagagactgtgtctcaaaaaaaataataaaaataaaaataaaaataaaaataaaaataaaatccttgttgggccaggtgcagtggctcacatctgtaatcctagcactttgggaggctgagatgggtggatcgcttgaggctaagagtttgagaccagcccaggcaacatagcaagacccatctctacaatagataaaaaatgtagccaggcgtgatggcctgcacctgtagtcccagctactcaggaggcagaggagggagaatcgcttgagcccagaagattgaggttgcagtaagctacgatctcagcactgcacttcaaattcattcttccattactgacatgtgaatgaagagatgggcaatctctggttcttccgttactgacatgtgagtggagagatgggcaagaaaccaataactaaacattggtatcaggttcataactgctgtgaataaaaacaaggcagggccgggcacggtggctcacgccgctaatcccagcactttgggaggacaaggagggtggatcacttgaggtcaggaattcgagaccagcctggccaacgtggcataaacctgtctctactaaaaatacaaaaattagccaggcgtgggggcgtgtgcctgaaatcccagctactcgggagactgaggcaggagaatcactgaggagttcagcttttttttctttttagagacaggtcttgctctgttgcccagggtggaatgtagtggtgaggtcatagctcactgcagccttgatctcccgggctcaagagatcctctagcctgagcctcctgagtagctgggaataccggcatctgccaccatgcctggctaatttttaaatttttttgccgagatggggtctcaccctgttgcccaggctaggagttcagcttttaccctgagtgagatgggagccagggagggttctgggctgtgatgggatgtttgtaagaggatgtttagcacagtctctgggatattgtgaccatactagacggtagccatggtaaccgtgatttctgatgtttttattatttgaaagggactctccaagtatttcttctcctctctatagctaaagtgctgtggggtgaataactacacagatttttctggctcttccttcgaaatgacaacgggccacacctaccccaggagttgctgtaaatccatcggaagtgtgtcctgtgacggacgcgatgtgtctccaaacgtcatccaccagaaggtaactggagattttgtgtgttgccttgacagacccctgagggctggtgacttcatttttatttttatcttattttgagaaagagtttcacccttgtcacccaggctggagtgcagtggtgcgatctcggctcactgcaacctccgcctcccaggttcaagtgattctcccgccccagcctcccaagtagctgggatcacaggcatgcaccgccacacccggctaattttgtatttttagtagagatggggtttcaccatgttggccaggctggtctcgaacctcaggtgatccacccaccttggcctcccaaagtgctgggattacaggcatgagctactgtacccagcctttttatttatttatttagttagttattttgagatggagtttcactgtgtctcccaggctggagtgcaatggtgccatcttggctcactgcaacctccgcctcctgggttcaagtgattctcctgcctcagcctcccgagtagctgggattacaggtgtgtgccaccacgcccggctgatttttgtatttttactagagatggggtttcctcatgttggccaggctggtctcaaactcctgagctcaagtgatcctcccacctcggcctcccaaagtgctgggattacaggcatgagccaccacacccggccttatttttatttttttagagatagggtctcactctgttgcccaggcaggagtgcaatggtgcaatcacggctcactgcagcctcaaactcctgggctcaagtgatcctcctgcctcagcctcccgagtagctgggaccacaggcacgtgccaccatgcctggctaatttttttttaatttttatttttaatagagatgaggccttagtatgttgcccaggctggtctcgaactcctggcctcaagcaatcctcctgcctcagcctctcaaaatgctgggattacaggcatgaaccaccacacccagcctggtaactttaataaaaattgcttcttttgggggacccctgcaaagggggtcagggagaaagaaatcaactcttattgagtgttcagcttattttgacaacacagagcagggacttacggttaccttctctcagaaactgaggctcggggaggggacatcactagttcaagatcacagagctttggcagagttggaatttgaagccccattggcctgagtccattgccggcaccacactacctgccttctagagaccctaaatggagcaataaccatgaaaagtgatcatcctagcgggagtgagggccagccacgtgatggagcactcactttgtgagttttgtcccatcctatcccttgaggtggggaactactcttctctcattttgcagataaggaaactgaggtacagagcatttcctgtgtccagggagtaatgagctgggtttcaagccacaccccagttcccccttaacttcttccacgagtgaatgagcacagagatcttctctgagggaagaaatagaaatcagagccagggcaacatagcaaagtccccatcacaacaacaacaaattttgtttttttgagacggagtcttgctctatcacccagactggagtgcagtggcgcaatctcgactcaccgcagcctccgcctcccaggttcaggtgattctcctgcctcagcctcccgagtagctgggattacaggcgtgtgctaccacgcccagctaatttttgcatttttttttttttttgagacggagtcttgctctgtcgcccaggctggagtgcagtagcgcaatcttggcttactgcaagctctgcctcccaggttcatgccattctcctgcctcagcctcctgagtagctgggactacaggctcctgccagcatgcccagctaatttttttgtacatttttagtagagacggggtttcaccgtgttagccaggatggtctccatctcctgacctcatgatccgcccgcctcggcctcccaaagtgctgggattacaggcgtgagccaccgcgcctggcctaatttttgcatttttagtagaaacggggttttaccatgttggtcaggctggtcttgaactcctgacctcaggtgatcctcccacctcagcctcccaaagtgctaggattacaggcatgagccaccctgcctggctaaaaaacattttttatattagctgagtgtggtgacacatgcctaagtcccagctattctggtggttgaggtgggaggatcacttaagtccagtagttcaagaccagccttggcaacatagcaagatgccgtttttacaaaaaaattaaaaatcagctgggcatggtggcatgaacctgtagtcccagctaactgggaggctgaggcaggaggatcgattgagcccaggaggtcaaggctgcagtgagccgtgattgtgccgctgcactccggcctgggccacagagcaagacccctctctaaaatagacaaaaaaaaaaaaaagaagaagaaatatgaatcgttcattccttcatttgcactgaatggctcatgcagggaaataggccctgtggaaaatcagccaggttgagtcccaggcaggggcctcagagacagacacgggccagacactggcccactgggccctacacaacctacctgtcacctcctaacctttcccccttgctcactctgttccagcacactggcctcctcgctactgctcagaaacaccaggcacatgcctgcctcaccgcctttgcacaggctttccctctgcctggagtgctcttccttcacgtcttcctacctctcaagtctttactcaactggcactttctccgtgaggctgttctgacttcccatctataaaagtatccctcatcccagtgatcatgctctgtcttcataccctgtttctgtgtctttccagcatttatcaccactttacagtattatcactatgcttgccgttagctgttctccccactcaaatgtcagccccatgagggcaggaattttgtctgttttatacattgctgggttgccactgtccaattcagtgccaggcacttaaatacctattatgtggccaagtgtgatggctcatgcctgtaatcccagtactttaggaggccaaggcaggaggatcacttgaggacaggagttcaagaccagcctgaacaacatagcaagaccctcatcttcaggaaaaatttacagattaactgggtgtggtgttgttgcacacctgtaatttcagctgcttgggaggctgacgcaggaggattgcttgaacccaggagttcaaggctgcagtgagctatggtcatgccactgcatccagtctgagtgacaggacgagacccaatctaagaaaaaaaaaaactattatgtgaaagggggcacggaacagtgacaacagcaagttcaatgtggcccaagcctccagaggtgagatgtgccaggggcctagaagagggagctactctggaagtgcaggaagaaggaagaaggccgggtgtggtggctcacgcctgtagtcccagcactttgggaggctgaggtgtgtggatcacctgaggtcaggagttcaccaacatggtgaaacccccatctctactaaaaatacaaaaattagccgggcgtggtggtgggagcctgtaactccagctacttgggaggctgaggcaggagaattgcttgaacccgggaggcggaggttgcggtgagccaagttagcgccactacactccagcctgggcaataagagccaaattccgtctcaaaaaaaaaaaaaaaaaagtgcaggaaggagagaggaggccctaccatcttcaggaggatgccctgccaacgcactttgcctggtatcctaatatctctgagcctcagtttcctcatctgtaaaatggaggaaagaagagtacccaaattatggggttatagtgagaaatgagtaagaaaatatgtggacggagaagccactgaatacgtcagctcttctgttcatatgtaaagagcacttaaaaataactaacagttattgaatgctggctacatgtcagaccactgcaatgtatttcatgtagattcattcttttatatttatgtatttatttagagacgggttcttgctctgtcactcaggctggatggagtacagtggtgcaaacatggctcactgcagccttgacctcctaggctcaaatgatcctcccgtctcagccccccaagtatctgggactacaggcacataccaccacactggctaatttttttattttttgtagagacggggtttcgctacgttgtccaggtcaatctcgaactcctgggctcagggaatctgccagcctcggcctctcagagttctgggattacgggcatgagccatcgtgcccagccttattaattctttatttagagatggagtctcactctgtcgacaagctggaatgcagtggtacaatctcggctcactacaacctccgattccctggttcaagtgattctcctgcctcagcctcccgagtagctggaattacaggcaccgccaccatgcctggctatatttttgtatttttagtagagatggggtttcaccatgttaaccagtatggtcttgatctcctgacctcgttatccacctgcctccgcctcccaaagtgctgagattataggcatgaaccaccacgcccagcctatttatttatttttgagacagggtattgctgtgtcccctgggctggagtgcagtggcatgatcatggctcactgaagcctcgactggctgagctcaagcaatcctcctgccccaatctcccaagtagctgggactacagccacacaccaggctaatatttacattttttatagagagggagtctcactatgttacccagactggtcttgaactcccgggctcaagtgatcctcccatcttggcttcccaaagtgctgggattatagacatgagctaccatgcctggcctttgattcttttactcctcatgaaattcttgtaaggcagatccagtgggtgccatttatagatgggaaaatggaggtacagagaggtatagcgacttctccaaggtcacacagctagtaataatcgaggatgtccaaccacacttaattgccacactggaacattagcacagacaagtagaagggaatcatcggtatattcttttgggggaatgaggaggacagggaagatgctagggtggcggggagcgggtggcagtcaaatgagatggagggaaggccctcacggctctctccccgcttctcctcaaagaatctgagagtcgtctgagtggcctaatgagttggggttgatggggacttgcaatccataagcccctaaccacctcctgcttgttttggtgtttgtttcctcagggctgtttccataaactcctaaaaatcaccaagactcagagcttcaccctgagtgggagctctctgggagctgcagtgatacaggtaagacccagcctctctagggtctttgagctgttttattaagcacctactgtatgccaaacactgttctggtcactgggacacaggagtgaacaaaactaaaaaaaaaaaaaaaaagaaactcaacaaagaagaacaaactaaacccaaatcaagcagaaggaagatgctaaagattagagtgaaaatatgaaaataaatgaaatggagaacatcaataaaaccaaaatttgattctttgaaaagataaaacaggtcgggtataatggctcagcctgtaattctagcactttgggaggctgaggcaggaggactgcttgagcccaggagttcaaaatcagcctgggcaacatagtgagactccccatctctacaaaaacaaaaataagaaaattatccaggtgtggtggcagatgcttgtagtcccagctacttggggggctgaggcagggggatcacttgagcctgggatatcaaggctagtgaggcatgattgtgtcactgcactccatcctgagtgacagagtgagatcatgtcacaaaaaaagataaaattgacagaactttagtagactgaagggcaaaaaaagggaaagattactcaaattagtaacattaggaatgaaagagagacatcactactgaccttacagaaataaagcaactataagggaaaagtgtgaacctgtatgccaataaattagctaacctagatgaaatagacaaattcctagataaacataaactaccaaaactgactcaagaagaaatagaatatgtaaatagatctacagcaagtaatgacattaaattagtaaccaaaaaacttcccacaaagaaaatatcaggcccagatatcctcactggaaatattaccaaacttttaaagaattaacaccattgtttcacctgcaaactctgccaataaaaaagaggaagacatatttcccagtttattctatgacaccaatacaagatattgcaatgacataagaaagtaaaactacaaggctgggtgtggtagctcatgcctgtaatcccagaattttgggaggctgaggcaggcggctcacgaggtgaagagatcgagaccagcctgacgaacatggtgaaaccctgtctctactaaaaataaaaaaattagctgggcgtagtgatgcacgcctgtaatctcagctgagattacagctgggatttgggttgctgaggcaggagaatcgcttgaatctgggaggtggaatttacagtgagccgagattgcaccactgcactccagccttggcaacagagcaagactctgtctcaaaaaaaaaaaaaaaattatatcttaataaaaagacaagtaacccaactaaaatggacaaaggattcaaatagagatttttatccaaagaaggcatacagatggccagtaatcacataaaaaatgctctaccacccatcattaattagggaaatgccaataaaaacactttattctcactaggatggctaaagataataacaagtgttgccaaggatgtggagatatttgaatccttacacattgttgatgagattgtaaaatggtgaagccatttcctaaaatgttaaacacagaattattatttgtcccagcaacttctctcctatgtttataatccaagataattgaagacatgtatccatacaaaaacctttacgtaaatgctcatagcaggattattcataataatcaaaaagtagataaaacccaaatgtacatcaagtgatgaatggataaagaaaatgcatatccattcaataaaatattattcaacaacaaaaacttattgatatatgctacaacgtggatgacccatatcaacatcatgctaagtgtaagaagccagtcatgatattatatgattccattatataaaatgttcagaataggcaagtccatagaaataaaaggtagttagtgattgccagggaccagagggtacgggaagaatggggagtgactgataataggtatggcgtttctgtggttcatgatgaaaatgttcttaagttatatagtagtgatggtagcccaactctgaatatactaaaaaccattgaactgtatactttagaaaggtaacctgtatagtctatcaattatatctcaatgttatttaataaaaagtgctccatgcccctggttgcccaagaaatttttcctacatgctttctgcacattgactaccaacatagtagtgtcttttctgcaaatcgccactaactgagacaaggctctatcttaccagtctgggatatttatttctttggggtaatttttttcattgtacaaatttataatattgaatatgtacttgtaaactatacaacaccttcctccccaaggatcccagcaggaaacagcattcagcccccagatggtccatttaagatgttttcaggggcctccttgcagaggggtgacagggttcagtgaaatgaggcgcccaggagctaaagacatggggaacttttatttctcctaggcctgaaggctctagaaagggcatgaagagggtaggagcccagaaggaggggaagaaaagagggaggaagtggggaaggaataccctaccattctctcctcccgctcacccgtcttctcccggtgcttcctattggccaagcctaaccggaagttatgtggcagtggagtctggggaatatggtccgtagggctccggggagggccgaagtggagaggatgggccaggcgcggtagttcacgcctgtaatcccagcactttgggaggccgaggcgaatggatcacctgaggtcaggagctcgagaccagcctgaccaacatggtgaaaccccatctctactaaaaatacaaaaattagccgggcgtggtgctgggcgcctgtaattccagctcctcgggaggctgaggcaggagaattgcttgaacccgggagatgaaggttgcaatgagccaagatagtgccacagcactccaacctgggcaacagagtgagactccttctcaataataataataataataataataataataataataataggccaggcgcggtggctcacgcctgtaatcccagcactgtgggaggccgaggtgggcaggtcacgaggtcaggagatcgagacgatcctggctaacacaataaaaccccgtctctactaaaatacaaaaaaattagccaggcgtggtggcggccgcctgtagtcccagctactcgggaggctgaggcaggagaatggcgtgaacctgggaggcggagcttgtagtgagccaagatccgccactgcactccagcctgggcgacagagggagacttcatctcaaaaataaataaataaataaataaataaaataataataaataaaaaataagtggagacgaatgcactgtaaccacagtggctccaacttagcccaggcggttcttcagccatctgtaaaaccctgcccctcgcctttctggaacaggatgctccccttgtccccgtaactccagtatgattctggtttggaggtctctagcattggatccatgtttctttcttcacgcatttcagttgccaggaattcttgccactttgctgctgtttatcaagctgggctgacacccaggcctggagaagatgagacacctgggcccatctggctgctggagattcagtctcagttttatttctctgtggcactcactgcttctggaggggagactgttaataaaagatttgggaaccccctgtccagcctgacttctttctccttactttcatttttggcaatgattttacctcaaaatgcctgaatgagagactatgccctttctcatacaactttcctgttttgtaaattattcttggtgtgtgtgtgtgtgtgtgtgtgtgtgtgtggtttttttttttttttccttttgagagagtcttgctgtgttgccaggctggagtgcaatggcacgatctcagctcactgcaacctccacctccggggttcaagtgagtcttctgcctcagtctcccgagtagctgggattacaggcactcgctaccatgcccagctaattttttgtatgtttagtagagatggggtttcaccatgttggccaggctggtcttgaactcctgagttcaggtgatccacctgcctcggcctcccaatgtgttgggattacaggtgtaagccactgcacccagccagttttgtaaattattctgtgaaaaatctagaactttcacaaaagccaagaacatccatccagagaaacatacacatcacccaggttcaacaatgcaaagattgacatatttgctttatcaatcccctttttacccttgataaagtattttttcttttttaaattgacaagtcataattatatatatttatagggtacaatgtgatgttttgatatatgcatacaatgtggaatgattaaatcaagctaatgaacatatctataggctcacttatcatttttttgtggtgatacatctgtgatcccagcactttgggagactgaggtaggaggatcgcttgagcccaggagtttgagaccagcctgggcaacatagcaagaccccccccgccttttttttttttttttaagatggagtcttgttctgtcacccaggctggagtgcagtggtgtgatctcggcttattgcaaccttcccacattctgggttcaagcaattctcctgctcaggctcccatgtagctgggattacaggcgcctgccaccacgcctggctaattttttgtattgttagtagacatggagtttcaccaggctggtctcaaactcctgccctcaagtgatccgcctgcctcggcctcccaaagcgctgggattacaggtgtgagccactgtgcctggcctgactccatctctacaagacaacaacatcaacaaaaccctccaaaaaacaaacctcagacaatgtcatttcttccctttatatttcagtacacatctctaacgatatgttcatttgcgttcacaaccataacaccgttatcacatctaggataattaacattgcttgtttggcatcccttaatacctaggccattgttgagtcttcctaattggctcaaaacttttttaaagggacagggcctcactctatcacccatgctggagtgcagagatgtgattgttgctcagggtaacctctaactcctgggctcaagggagtctcccatgtcaactttctaagtacatgggactacaggcatgcgccaccacacccagctaattttttttcttttttcttttttcttttttgagacggagtttcgctcttgttgtccaggctggagtgcaatggcacgatcttggctcactgcaacctcagccttccgggttcaagtgactctcctgcctcagcctcctgcctagctgggattacaggcatgtgccaccatgcctggctaatatttgtatttttagtagagacggggtttcatcatgttggccaggattgtctcgaactcctgacctcaggagaattgcttgaacccaggaggtggaggttgcagtgagctgagatcatgtcattgcactccagcctgggcgacagagcaatacactgtctcaaaaaaaaaaaaaagtgtgaaatgcttggggagtgccagatgttctgggcttactgctttctttgtggttttggttatttaccctgttcctcttgtccacatatttcctgaaaagcatgagttaccagccctggctgtagattagaatcacctggaagctttaacaaactacctaaacctgaaccacagatcctgatcttttattattattattatttttttgagacagagtctcgctctgtcccccaggctggagtgcagtggcgcgatctcggctcactgcgagctccgcctcctgggttcacaccattctcctgcctcagcctcccgagtagctgggactacaggcacccgctaccatgcccggctaattttttgtatttttatagagatggggtttcaccgtgttagccaggatggtctcgatcttctgacctcgtgatccgcccccctaggcctcccaaagtgctgggattacaggtgtgagccaccacacccagcctaattttttgtatttttagtagagacggggtttcactttgttagccaggatggtctggatctcctgacctcgtgatctgcccgcctcagcctcccaaagtgctgcaattacaggcgtgagccactgcgcccggccagatcctgatcttctaatttaattgaactgggctgtgacgtgggtctggggatgatcctagtggtttttaagatatagtcatggtcacagctgagcatcaatgaactcaggggttcattcaatgaccatagcatcctgaaccaattctttcagaagaggttgcaaaatggtggtttatctaattccttttctttttcttttttttttgagacagtcttgctctgtcgcccaagctggagtgcagtggcacgatctcagctcactgcaacctctgcctcctggtttcaagcgattcttctgcctcagcctcctgaatagttggagttacaggtgcccgccaccacacacggctaatttttgtatttttagtagagacggggttttgccatgttggccaggctggtctggaactcctgacctcaagtgatcctcccacctcagcctcccaaagtgctgggattacaggcgtaagccactgcccccagccagaaataaacttttttacccacacttctgacaccaaacatgtggggttttccacaccaagtaattctccaattctctgtggacacccgctgggtgttctacaattcagttctgacaccaattacccagagttggtgtgtgaccccacagatttaagggctgagtcccacaaaactgagcttccctcacttcagaggtatcaagtattgagttcccaggttacccatatttctgtccaatgtggctacaaagtcagggggggttctcacaagccccctccctttcaggtttgataatttgctagaatgactcacggatctcaggcaagtgttttacttactactcctgatttattataaaggagacaactcaggccaggcgcagtggcttatgcctgtaatcccagcactctgggaggccaaggcgggcggatcacgaggtaaggagtctgagaccagcctggcctatatgatgaaaccccgtctctactaaaaatgcaaaagttagccgggcgtggtggcacacgccctgtaatcccagctactccggaggctgaggcagaagaatcgcttgaaccgggaggcggagcttgcagtgagccgagatcgcgccactgcactccagcctgggcgacagagcgagactctgtctcaaaacaaacaaaacaaaacaaaacaaaacaaaaaaacaaaaaaaggagacaactcaggaacagccaaatggaagtgataaagagggcaatgtgtgggggatggtgtgcagcacttccacaccctttcttggggaggggggcaccacccttccagcacctccatgtgttcatcaactcagaagctctccaaacctgtcatttaggttgtattttgttttgttttgttttgttttttgagacggagtctcgctctgtcgcccaggctggaatgcagtgacgcgatcttggctcactgcaagctccacctcccgggttcacgccattctcctgcctcagcctcccgcgtagctgggactacaggcgcccgccaccacgcccggctaatttttttgttgtattttcagtggagacggggtcttaccgtgttagccaggatgatctcgatctcttgacctcgtgacctgcccgcctccgcctcccaaggtgctgggattacaggcctgagccactacgcccggccaggacttttttttttttttttgagacggagtttctctcttgtcatccaggctggagtgcaatggcacgatctcggcacaccccaacttctgccccacttgttcaagcgattctcccgcctcagcctcccgagtagctgggattacaggcatgtgccaccaggcccagctatttgttatatttttagtagagatggggttttgtcatgttggccaggctgatctcaaactcctgacctcaagtgatcctcctgcctcagcctcccaaagtgctggaatgacaggcatgagccaccacacctggccaatcctagcactttgggaggccaaggcgggagcatggctggaagctgggagttcaagaccagcctgggcaacatagcaagatcccatctctcaatcactcaatcagctggatgtggtggtgcttgcttgtagttccagaaactcaggaggctgaagtgggaggatcctttgagtccaggagttcgaggctgcagtgagccatgattgtgccactgcactccagccagggccatacggcaagaccttgtctccaaaaaaaaaaaaaagaaaagaaaagaaaaagaaaaaagaaatgctggggagggagattgcagtactaaatcaggggagggggcagtgagaaagtgagatttgcacagtagcccaaaagaggaagttcagttaggggagctttgttgtattagtctgttttcctactgctggaaagaactgcccaagactgggtaatttataaaggaaagaggtttgcccgtgtacggtggttcacgcctgtaatcccagcattttgggaggccaaggtgggcagatcatgaggtcaggcgttcgagaccagcctggccaacgtggtgaaaccccgtctctactaaaaacacaaaaattagccaggcgtagtggagtgtgcctgtaatcccagctactcgggaggctgaggcaggagaattgcttgaacctgggaggcggaggttgcagtgagccaagatggcaccactgcactccagctgggtggcagagtaggactgagtctcaaaaaaaaaaaaacaaaaaaatacccaaaaaaacataagaggtttaatttactcacagttcaacatggctggggaggcctcaggaaatttacaattataacagaaggcaaaggggaagccagataccttcttcacaaggtggcaggaaggagaagagccgagagaaggcggaagaatcccttataaaaccatcagatctcgtgagaactcacttgctatcaggagaacagcatgggggaaccgcccccaggattcaatgacctccacctggtctctcccttgacacgtgaggattatggggattacaattccagatgagatttgggtggggacacaaagccaaaccatatcaactgtgactaccttgggtaagggccatccaggcagaggcagggggaacattctgggcaaaggccttggggcaggggcctggtatgttcagatagcagcaagtaggccagagtggccggaggggagcaagtgtggggaggccagtggagagatgagggtagggaagggatggatcagatcatgcagggccccgggggccacaggaaggacctcagcatttactgcaagtaaggtgggagccatcgaatgttctaagcagaggaggaatgcgctgtgactcaggtgttcacaggtgccctcttgctgctggggagagaactgagctttttactagaagtagttgagggaaatagtgtcctccctaccttccatataacagagctttccaaggtcaaggtggtggccatgggacccagtgggaggcagcccgaggcccggtgaggtttctgctgtgtcttgaagagcccttgactgatatctgcttagttgcaaatcaaaccccctttcccagaaacgcacttcactaatggaaataaaagcacaactatatttgggcacgacggatttaagtttttcttgttgagaagagtacatctttccaaactggacatcaaggaattgctacacagaagaaccacatccaggatagaaaggaccagccagagctcgttcagtagtgtatttcagaatcatcagggaggagccggtagcagaattatcccgttaacactgagaccacatttcacctgttacttatttttctaaatggagtaggagagaaagatgctaaaatgtgatcttgggaggagtcccccagtcccccgaaaaagaagaagaaaaaaaaaaagcagaactccaaacccctgtggtcatggcaatttcccatcaaaactgcccatgtaaaataaacacaagctgctaaaagtgaatgttaagaaggaaggcactggttagtgggtggtcctgaccaatcccctggagctggagaggggttttcccacggcctttggtttaatgtgtctgtaaactcaacaaacctccgtttccctgaggtaatctgcaaaaacatcagttttcagtccccagagaccatttccaattaaacctcaccccccaaatcattcaatgtaacatttgccttatttttagaagaaacaaatgttcccatattattcccagtttttgagagaatcctgaggcagctctctcggctgctacttgaagttgaattcttgaaaaatcttatgtaaacagaaagcttaggccaggtcaggagtaaaatgcagtcaaagctgtttctcatcacacaggtgattacaggttagctctgccctattcaagacaatctgatccattcctttttttgacagcagtttagagacaattggccaacaaaaccagcctggccaacaaggtgaaaccgtcgctactaaaaatgcaaaacttagatgggcgtggtggcaggtgcctgtagtcccagctacttaggaggctgagacaggagaatcgcttgaacccgggaggtggaggttgcagtgagctgagatcatgctactgcactgcggcctgggcgacgagcgactctctgtcttaaaaaaaaaaaaaacaaaaaaacctcagcaggccatactgcatcttgagaagtctttttgaagctactttagtttgactttagtgttaaagtagctaaaaatttttgactcccgcccacatattcagataccctcactttgtgcataggatttgtccattacacctcagtcatctaatttgttggtataaaagataccctcggctgggcgtgatggctcacgcctgtaatcccagcactttgggaggccgaagcaagtggatcacttgaagtcagtttgagacaagcctcaccaacatggtgaaaccccttctctactaaaaatacaaaatttagccgggtgtggtggcaggtgcctgtaatgccagctactcgggaggctgaggcaggagaatcgcttgaaccctggaggtggaggttgcagtaagctgagattgtgccaccgcactccagcctgggcaatagagcgagactctgtatcaaaaaaacaaatgaaaaaaagataccccactccaaagttctaagggtagcctctggtatgaagaaaccagggctccctagaaataaatctaaacttgaaccaggctttccccctcacacataccccagggaagaggctgagctcatgaaagctgcaggaagtcattttggcttcaggggctgggagagcagacacaacctctgaaacagagtcagggacgtgggaacataaaacatccacttagccatcctaacagtgctggtcctgtgaaggggtgttggttggtgtttgggagcaaagaaaaggtgctgcgcccctagagtttggaatctgatgggcagaaagtgcctctaaaccggaggtcaagatgtacatcttcaaactgcacacgtaacctctgagcagaagcccctggaggtggggaccccagcttcagagactccccggcactgatcacagtccatcccccccattcacataaggtcctgccactctcaggctgtctacaaagtacaagcagtgacagcaagttactcaatcctacctcctcaccccttccgcccaacccccagcatcccttagaagtgacccctagtttgaggctgtggtgagctatgattgcaccactgcactccagcctgggtgacagagccagaccatctcaaaaagaaaaaaaaaaaaaaagaagtgactcctccattagcaaaaattgtcacatccctgggccctgccgatgacaaggattgggaaatggacattgggtcttgaagggcccccctcaagtcggagcccaggtgcttacatcagaaagtcgccgacaactgcctgcggtggctgggaacgttgcttcatttccttttctagcaggatgcatgattgggcaagaacttgcttaaaacacaaccagctaaacagctaaacagggcctgggagggaggccccagccccaggctcctggctctgaggttaattaacttctggccgaaagcccagagccggagtgctaggggttgggcgaatctctgcccagtctaatgtggtccatagttccagaattcacttcaggatcagagatgtggtgaacacagcaaaaacagtggcagggtcgtgggtgatgtggatcttgggggaagcttggaaggcacttctggggtccctgaagccggggggttgaggggatctgactccctgtcccttctacaatgggaaaaggctgcttcaatgctgcttttcgcaagtagagggtctgcaggggtcaaagggatcaccatcccaccttggaatccagaaagttcgtgggggcaggctcagagaccagcctgcaggacctgagaaagaggcgccgccttccctggatgaactccaagaacccacactgtgcgaggaagatgaaccatcttccaccagcttgggaatatcagtcctgcccaacccagaagagacctggaaaatggttctaagctagaaggcaccacggatgcccctccatcagaaagagtgggacgtgtcacccatggccaccctcaacacaccctggaaagcagcaagctcatgcacgtcagtgtccctgggcctctgcctgccatgcagagctgagtccccatggtccgcagcctcccaccggggctgcctgaggaacctggcagccacggcgacattgtgaaggaatgagccatgcaggagtcggggagcagttgacaggagggaagggattgccctgagcttggagataaccactgtggctcacgcctcgatcacagtccctgccgaggcaggagaggggtgggtggggggttgggggccatctctagcagctgcagctgctgggctggggggctggagcatcccccacggccgggcctttcccgttgctgcctgagctggagctgggttccagggactcgttcatcttctcgcagatgacatccaccaggcgctcgaagacctgcttcacattgatgttctccttggcactggcttcaaagaactcgaaacctggatgaatgttaaggtggggacactcgtaagacccctgagggcagagtctcagctgtggcatcacagaaacctggcttctaagcctagttctgctctttatcctgctgtgggaccttggttgtgtgcctttgccactccaagcctcagtttgctcacctgtaaaatgggaatgatgatcctaccaatgataaaaatctgtggcaggccaggcgcaggggcttatgcctgtaatcctggcactaaaggaagctacggcgggaggatcgcttgaggccaggagttcaagaccagcctgggcaacatagcaaggccctatctctacaataaatttttttaaaaagtagatgggcggccaggtgaggaggctcatgcctataatcccagcactttgggaggccgaggcgggaggatcatttgaggtcaggagttcaagacccgcctgaccaacatggtgaaaccccatctctactaaaaagacaaaaaattagctgggcatggtggcacgcgtctgtaatcccagctactcgggaggctgaggcaggagaattgcttgaatctgggaggcggaggttatagtgagctgagatcacaccactgtactccagcctgggcaacagagcgagattctattaaaaaaaaaaaaatagaggggcatggtggcgttcacctgcagtctcagctactcggaaggttaaggcaggagaatggtttgagcccaggaggtcaaggcagcagtgagccatgatcacaccactgcacaccagcctgggtgatggagcaagaccctgtctcaaaaacaaaacaaaacgaaaccctgcggctgcagccatggtctggacaatcctaagatctctttgtcacaaggcagtggctgcaagagtataggtgggagggtacatgaagagttctgctgccctgcggccatggcagtgcccacaggtggctatagctcagcttccacccaatttctgctgcacagaaaggcatggtcaggagacccatcaagtcacattttccattgctttttttaaaagagaaacggtctctctctattgcccaggccggggtgtagtggtatgaacatggctcattgcagcctcaacctcctgggctcaagcgatcctcccgccttggccccctgagtagctggggctacaggtgtgccccaccatgcccggctaatttttcaattttttcttttgtagaggtgggggtctcgctatgttgcgcaggctggtcttgaactgctggcctaaagcgatccccccgcctaggcctcccaaagtgctgggtttaccagcgtgagccaccacgctgggcttcctgcatccttttaaggttcctgagggtctgcctgagaggagctgtccctgaatctccatgcagccccacctgccacatcaccaaggtaagccaggaattcagacaaacgcctgccacgttacacgtggccaagggtaagtggacctgtcttctctgtgcgtcatgctgaactatgaaaatggaatcataatgagttagctgtgtaattacccatttattatctgtctccgctactagaaagccagctccaggcaggcaggatttccgcccatggctgtacccagtgcccgacacagagagggtgcttagaaactgtctgctgaatggttgaatgaatgaatgggtaaatgaacaatagcaggggcaggacatgaacttagatctcctactgtcagcccagagatatcaaagccatcccactgtcttcctgggcaaatctggtgtttccttatccacgcgtggctttgcctcataccatctgtgttctttatttttctttttgttgagacagagttttgctcttgtcgcccaggctggagtgtaacggcacgatctcagcccactgcaacctccgtctcccgagttcaagcgattctcctgcttcagcctcccaaggagctgggactgcaggtgtgaaccaccatgccaggctaatttttgtattttcagtagagacagggtttcgctattttggccaggctggtatcgaactcttgacctcagatgatccacctgcctcagcttcccaaagtgctgggattacaggcatgaaccaccgtgcccagcttatttttctgatattaatcaggcgtggtggtatgcgcctgtaatcccaactactcaggaggccaaggcaggagaatcacttgaacccaagagttcaagaccagcctgggtaacatagggagaccctgtctctaaaacaaataaaaattttaaaaaggaaaaaaaatacattttttggatgtcattcaatagagaaatttactggagaaactagaaactacagaaaagtattaagacagcctataatcccagtactttgggagactgaggcaggtgggtacctgagctcacaagtttgagaccagcctgggcaacatagcaagacccagtctctaaagaaaatataaaaattaaggccaggcatggtggttcacgcctgtaataccagcattttgggaggccaaggtgagcggatcacttgaggtctggagtttgagaccagcctggccaacatgatgaaaccccgtctctactaaaaatgcaaaaattagctggccatggtggtgcacacctgtgatcccagctacttaggaggctgaagcaggaggatcacttgaacctgggaggcggaggttgcagtgagccgagattgtgccattgtactccaggctgggtgacagaacaagatattatctcaaaaaaaaaaaaaaaaaaaagaagaaggttggggggtgccaggcgtggtggctcacgcctgtaattccagcactttgggagacggaggtgggcggatcacgaggtcaggagttcgagaccagggccaatacggtgaaaccccgtctctactaaaaatacaaaatttagctttgtgtggtggcacgtgcctgcagtcccagctactcaggaggctgaggcagaagaattgcttgaacccgggaggtgtaggttgcagtgagccgagattatgccactgcactccagcctggcaacagagcaagactccatctctaaataaataaataaataaatattagccaggtgtggtggcatgcacccgtagtcccacctacttgggaggctgaggtgggaggatgacctaagccagggaagttgaggctgcagtgagctgaggtcatgccattgcactccagcctgggcaacagagtgagaccctgtctcaaaacaaaaacacaaagaaatgtatggagatagagataaaagtaatttgtaatctcatcacttggaaacaattactgttggcgttttgctatttagctttctagtctttattcatctttttttttttttttttaagacagagtctccctctgttgcccaggctggagtgcagtggtataatcataactcactacggccttgactcttgggcccccctcagtctcccaagtagctgggactataggggtgtgccaccacacacagccgatttttggtattttttataggggtggggcttcaccatgttgcccatgctggtctctaactgctagactcaagtgatcctctgccttgacctcccaaagtgcaaggattacaggcatgagccaccatgcccagcctttagtctttttctatataaatatgtcatttgttggggttaggtttgtaggggatgtgtgtgtgcacatgtatgtgtgtctggctttttttcctacaaaattggaatcaggccaggcgtggtggctcacacctgtaatcccagcagtttgggaggccgaggcagcggatcacctgaggtcaggagtttgataccagcctgaccaacatggtgaaaccccatctctactaaaaatacaaaagtagccaggcgtggtggcacatgcctgtaatcccagctgttcgggaggctgaggcaggagaattgcttgaacctgggaggcggaggttgcagcgagccaagattgtgccactgcactccagcctgggcaacaagagcgaaactccatctcaaaaaaaaaaataaaacaaaagaaaagaaaaaaaaattgggatcaaattctgtgtcctgctttgtatgccaatcttctttttgtgtgtgtgtgagatacaggctcactccatcacccaggctggaacgcaatggcgcgatcttggctcattgcaacctccgcctcccgggttcaaatggttctcatacctcagctttccaagtagctgggattacaggcacgtgccaccacacccagctaatttttgtatttttggtagagacagggttttaccatgttggccaggctggtctcgaactcctgacatcaagtgatctgcccacttcagcctcccaaagtgctaggattacaggcgtgagccaccgaacctggcctgtactccaatattttaaacataataacagaaagtgagaatccccctttaccccgagaccccagatataatccgcaagtaggtgtggaaagcacctccaagtattccagcccatcgcgggcgttaactgatttcaccacttccaggctaactggggatccagggccctgccccacagaacagagatccagtttctccaacaaagcaatggcaagaataaaaggggaaagggactggttatggcttagaggtcagcaaacctcctctgtaaaaggccagatcgtaaatattttaggctttctgggtcatatggtctctgtctcaattactcaatttcacgcttgaagcactgtttatacccttttctgtattgagacagcctgtaatcacagacgtgtgattaccataaaaatagcaaccatagacaatgcatcaacaaataggcatcaactgagcacgggtgtgagttcactcctgtgatcccagcactttgggaggccaaggtgggaggactgcttaagcccaggagttcaagatcagcccagacaacatggcaagacctatctcttaaaatttttttcttttttgagacggagtctcgctctcttgcccaggctggagtgcagtggcacgatctcggctcactgcaacctctgcctcccaggttcaagcaattctcctgcctcagcctcctgagtagctgggattacaggtgtgtaccaccacacccggctaatttttttgtatttttagtagagacggggtttcaccatgttggccagggtggtctcaagcttctgaccttgtgatccacccgcctcggcctcccaaagtgctgggattacaggcatgagccactgcgcccggcaaaaaaatttttttttaattaggcaggtgtggtggagtacacctggcatcccagctacttgggaggctgaggtgggaggatcacttgagcccaggagttggaggctgctttgagttatgatcgtgccactgcactccagcctgagcaccagagagagaccttgcctcaaaaaaaaaaaaaaaatttaaaaaataaatggttgggaggttgaggcgggtggatcacctgaggtcaggaattccagaccagcctggctaacatagtgaaaccccatctctactaaagatacaaaaattagccaggccccgtggtggtgggtgcctgtaatcccagctactcaggaggctgaggcaagagaatcacttgaactggggaggcggaggtggcaatgagccgaaatcacgccattgcactccagcctgggcgacaagagcaagactccgtgtaaaaaaaaaattcttttaaaagggtatagctgtgtctcagaaaaacttcatttatagatacaaatttgaatttcatataaatttcccatgtcatattattttttttcaaccacttaaaaatgtaaaaaccaaccaggtgccgtggctcatgcctgtaatcccagcactttgggaggctgaggcaggccgactgcttgagcccaggagttcaagaccagcctgggcaatatagtgagacctcatctctacaaaaaataaaaataaaaaattagccagtgtgctggcttatactagtagtcccagctacttgaaaggctgaggcagcagaatcacttgagcccaggtgtctgaggctacagggagctttaaacttattttgtagagttggggtctcactatgttgcccaggctggtctctaacccctgggctcaagcaatcctccctcctcagcctcctaaagtggtgggatcacaccactgtactccagcctgggtgaaagagtgaggctctgtctctattatttaaaaaacgacgacgacaacaaaacagctggagttgcatagtgaagtgtttacagacaaaaggtttcgatgtcaagggtttgctctcaatgctctaggaaaaaaaggaaaagtattttgggggaatagatgattcaagattgaaaaaatgttgagacctaattaagctgaataatgttttatcaaagtctattatacattcctttctacttgtgaatgtatttgaacttttcttagatggagtttcactcttcttacccaggccggagtgcaatggtgcgatctcagctcacacaacctccgcctcctgggttcaagtgattctcctccctcagcctcctgagtagccggaattacaggcatgcgccaccacgaccggctaattttgtatttttagtagagatgaggtttcaccatgttggtcaggttggtctcaaactcctgacctcaggtgatccgcctgcctcggcctcccaaagtgctgggattacaggcgtgagccaccacgcctggccgaacatttctcattttatttcattgttttttgagacaaggtctcactctgtcacccaggctggcatacagtggtgcaatcttggctcaatgcaacctctgcctcccaggctcaagcgatcctcccacctcagcctcctgagtagctgagactataggtgtgagccaccatgcttagctaatttttgcatttttttgtagagacagggtttaccatgttgaccaggctggtctcaaagtcctgggcttcagcgatctacccaccttgccctcccaatgtgctgagagtatttgaacatttttatcacaaaaagttattattttcttccttttttgagacagggtctcgctatattgcccaagctggtctcaaattcttggcctgaagcaatcctcctaattcagtctccagagtagctgggattacaagcacatgccaccattcctggccaaagttatttttttaaaaaagtgtaggccgggactataaaaaccaaccaggtgcagtgactccatctcaaaaaaaaaaagtgttaagaacatctgtgaatcaagctggcagatttcttgcctcatgtgtccaaagaaatatatgtaaaaatgactgctgcagctgcatttgtcagaggaaaaggctagaaataatctccatggctgtcaacagaggaaaaggttaaggaaacacgaaatggaatagtacacagccatgcaaaagaatgagccagctctggggctgatggagaaatatttctttttttttttttttttgagaaagagtcctgctcttctacccaggctggagtgtagtggcgtgatcttggctcactgcaagttccgcctcccgggttcacaccattctcttgcctcagcctcccgagaagctgggactaccggcgcccaccaccacgcctggctaatttttttgtatttttagtagagatggagtttcacagtgttagccaggatgttcttgatctcctgacctcatgatccgccctcttcggcctcccaaagtgctgggattacaagcgtgagccactgcgcccggcagagaaatatttctaggatatattatttagtagaaaagttcaaagtgcaggaaagggtatatacagtagggaacatctgtgtaaaacaaaaaagtagccaatgtgttgtcaatgcctgtgggtgctcagcatatttctggaaagagatacaagaatcagagaagctgggagaccagaactgcaggtggggagtgggttattgccttagtctcttcctgtgccttctgaattttgcacatagggtgctggcttggatggggcttatgggaaagctggggttaaaaactgattgcaagcatcagtttctttctttcctttttttttttttcttttgagacagagtctccccccattgcccaggctggagtgcagtggcgtgatatcggctcactgcagcctccacctctcaggttcaagtgattcttctgcctcagcctcccaagtagctgggattacaggcgtctgtcaccatgcccggctaatttttgtgcatttttagtagagacggggttttgccatgttggccaggctggtctagaactcctggcctcaggtgatctgcctgtctcagcctcccaaagtgctgggatttcaggcatgagccaccacgcccggccacaaataaagttttattggcaaacagtcacacccattcatttatgcattgtctgtggctgctgtcatgcagagttgggtagttgccatagagactgtatggccaaaaatatttactatctggccctttaagaaaaggtttgctgactcctggactaaagaaagcagtcgtatccactattttgctagaacaaaacagccaggcacggtggctcacgcctgtaatcccaacacttcgggaggctgaggcaggtggatcacctgtcaggggttcaagaccagcctggccaacatggcaaaaccccatctctactgaaaatacaaaaatgagtcaggcatgctgcgcacacctgtaatcctggatactcaggaggctgaggaaggagaatcacttgaatgcaggaggtagaggttgcagtgagccaagatcgcaccactgcactctagcctgggcaacagagggagactccatctcaaacaaaaacaaaaacaaaccataaagaacatccccttgggctggtgtggtggctcatgcctgcaatcctagcactttgggaggctgaggagggaggatcacttaaggtcaggagttcgaggccagcctgggaaacatagcgagaccctatctccacgcaaaattaaaaaaaaaggccaggcatggtgcctcacgcttgtaatcccagcactttgggaggccaaggcgggcagatcacgaggtcaggagatggagaccatcctggctaacatggtgaaaccccatctttactaaaaatataaaaaattagctgggcatgtggcacgcgccagtagtaccagctacttgggaggctgaagcaggagaattgcttgaacctgggaggtggaggctgcagtgagccaatacggcaccactgcactccagtctgggtgacagagtgagactccaactcaaaaaaataaaataaacctgggaagcggagcttgcagtgagccgagatcgcgccactgcacttcagcctgggcgacagagcgagactccgtctcaaaaaaataaaaaataaaaaaataaagaacatccccatccttttccatggctgcatagtattccaccatgtgaatatactttatgtccacttggttctccaactgtgagacacctgggggggatctgtaggtttcactcctactaatactactactacactccacacaccatatcccacatgggtgaggatatctctaggatcaatttccagaaatggttttgctgggttcccaggggataggcagtggggcagtgggagttcctgcgcgtggatcccctgcaattagacgggacatgtggcatacacatgggtatcttcctgggcagatcctcaaaggatcagtgactgggttggaccctgaatcagaggatggggatgagggtttggttctgggagaccagggcctgtggcccaggctgggcactaaccaaggtcgtcggcgagcctccggccatcctcagcaggcacaacacgttcgtcctccaggtcacacttgttccccaccaggatgacctgggcgttgtcccaggagtaggtcttgatttgcgtggccctgcagagttaccagtggtgagccatgagccgggggggttaggggtcagaggagagggcaaagatcaggggtccatgatcagcaagcactcaccagtcctgcacagcggcaaaggattcctgattggcgatgtcatacatgagcaggaagcccatggctccccggtagtaggccgtggtgatggtgcggtagcgctcctggcccgctgtgtcctggacaaatggcagtggcagttggctgggaactacctgtttcccagtccacccctgtcttagaggggcactgccctgtactcatagccccagccttacgggggagacacagacttgcttgtacaacctctggtctgatggagaatacacagatcctgccctcacaaccccagtctgatgggggaggcatggattcattaccaagggatctccccagtctgatgagggagagacttgggcttgcccttgaggggttccaagtctcaggggtcagtggcctctcacagacttatgagcccctttgaccttgtctctaagaaccaactgggccagatggtaccatcctgacaggacaccttggtactcttgctaccacgatgattgttaccagcggctaagttgggagagggagctaggtgtgactctgcagaccaggtcggtccaatgggggtcccagggtcccctctaagatggtacccaaaactcttccctgttggtcaccagcacctgggacctttcttttttctttctttctttttttaatagatggggtcttgccctgtcacccatgatggaatgcagcggtgcaatcatagctcactgcagcctcgaactcctgggctcaagcaatcctcttgcctcagcctcctgaatagctgagactacaggcgggagctaccatgctgggctaatgtttaaagttttttttagagatgagatctcgctatgttgtccaggctggtctggaaccgctgggctcaagtgatgctccacctcagcctcccaaagtgttgggattacaggcataagccaccacgctagtgtcacaagtacttcaaacatgtcttaggttagtatcatctccgcaatcagacccccaggaataatactgtttcccgccaggcacagtattacagtggctcatgcctgtaatcccagcgctttgggaggccgaggtgggcggatcacgaggtcaggagttcgagaccagcctggccaacatggtgaaaccccatctctattaaaagtataaaaaattagccgggtgtggtggcgtgcacctgtaatcccagctactcgggagactgaggcagaagaattgcttgaacccaggagacggaggttgcagtgagccaacattgtgccattgtgctccagcctgggcgacagagcaagactctgtctcgagagaaaaaaaaaaaaaaaaggtcgaggcaggagaatcgcttgaacccaggagatggaggttgcagtgagccgagatcccgccactgccctccagcctgggcaacagagtgagactccgtctcaaaaaaaaaaaaagaaccctccaatgaactttcctggagggaccccacccccaacccacagccagcctcccagcctacccagatctgcagcttgatcctcttgtcatggcggtagacggtcttgaccttgaaatcgatgcccacagtactgacgaaggcgggagtgaaggagtcgtccgcgtatcggaacaggaaggaagtcttgcccacactgctgttgcctatcagtagcagtttgaacatatagtcgaagttctgatctgctgcatcccgtgggcctgcctgggtgtctccagctgatgccatcttggcacaagcctcctgggacagggagacctgaaatcctcagggagaggagacgggcgtcctgcaggggaatcaaacatcaagaacagctcctgtgaatgcaccaggcctggattcaaatctcagctcggtcactcggagaccaagtgatgctggatgcatcgcttgccccctctagacctcagtgtcctcttctaaaaaatgggatgtttgtcacagtcccttcctgaaagagtagttggttgtgagcctaaaatgagtttctttctttctttttttttttttttagagacaagatctcgctctgttgcctgaggctggagcgcagtggcgtgatcatagctcactgcagtcttgacctcctgggctcgagtgatcctcctgcctcagcctcccaagtagctgggactacagacatgccaccacatcaggctaatttaaaaaaaatttttttgtagagatggggtctcattatgttgcccatgctggtttcaaactcctctgctcaagcaatcctcctgcctcagccttccaatgtgctaggattacaggcatgagccaccacgcccgacctaaaatgtgtttctttattcattcaacaaatgcttactctctgccgggccctgttctctgtggaaatgcagctgtgaataggacaagaaaaagtccatcctcgggtggtcacgttccttccagtgggaaggtattaacacacgtaacggtcattagacagtgcctggtatagagctggggcacaaaaaatgtgactgctgtttaatcttcacaccctgtggcgtaactgagtctgtattggggtggagggtggggagacctttcctatctggaaacccagaggcctagcaaagggttcaagtgcaaggccgagggtaaggggctctggcccctgcagaactagattctggagaaggcacaggtgtggacttcgccccagcgtgtgcagccggtgtggcccaggtgtaagctggggtggggtggggggaggacctgccagctggataagctggatagagcccctgattaaggcttgggtgttgactttggcaggtgtcagccactggggcgcctgccgcccaccaactcatgccaaatacaaccccttctctgagttccaaggggaaggggttttctatgtacagggcccaggtttagagtccagttctaccccctaaatgggtactgctattttctatttgtcaaaggggccaggcctgtctccttctgcccaaggctgactcactccagccccagtccacggaggcaggagtgagagtccttatacccaaggaaacgatcccagccacttaattaacacaaccccaccaccacgaccactgccgcccacccttggtctttccaggcaatctgtcccacggctaggctccttgaatctgcccacactccaacatgctgcttcatccgagtccaaggtgctccctcaaccctcataacctctcccaggcctcagtttccccagctgtctatggccgctgcgggaaccgcacggagaggctgcagaaggcctggatgcaggcggggcagaggcagagacagccctggcacagctatttctcaactgcctttggggcttttttccattttaaaccaggacccaaccggccccaccccgtgttccaggagaacgagtttaaggaggggaagagaagaggcaggaaacctttccccacgcagggcagggccgcaaggctggggcccccacctcccccagccttagctcacctgtgtcagtcggtcccgcctctttctaaccatctgccgaccctccctcaagcctggccccggagggctcgcctctgttccccttcactagatttggggcgccccagccaatgcaggtggactcaggagtttcccccatcaccatatggtcccaacgcctgtccccagctgggctctctgccccgcccgcgccccatcagcgcttcccaagtgcccagctgggtgggggcgagggcagaggcgttccccgcagccccgcctttgttccccagaccccctaccttcctcccaaacccccgtaccccacagacctgctcggatgcggaggggccgggtgggctgcgctccttcccaggggtgacctcgcgtagggggcgccgcctgcaggggttccgcctgtgaactcgctgcggcttggccctggccgcgaccccgaccccgcagccgcagaagccagcagcctgcagccacccggatcccgcgcgggctccgcccagaaggcggaggaagggccgttcccggagcgggggatgggggaggacgaagaggggccgagtcttgggcggggctttcagagagcgggtgggaggggctggaagctgcaccaagcgtctagagcccgtcctagccaagcaacatctcattttcccagctgcttgtaaagagcttctactatacgcacggctgttaaaagcatagagtcttgggcctggttcgagtcccagctccaccactttctagtcttgtggctttggacgcgttacttaacctctttgagcctcagtttccccatccgtcaagtagctcatagcgagagtacccaacctcacagagttgtgggaggattctgatctgagttagtgtttgtcaagtgcagtgccggccttaaagtaggctaggccaggcgcggtggcctgtaattacagcagtttgggaggccgaggcaggagaatcacttgaggccaggagtttgagaccagcttgggcatcgtaaggagacctcatctctactaaaaataacaaaaattagccaggtgtggtggcgtgcgtctgtaaccccagctacttgggaggctgaggcaggaggattgctggagacatcgaggctgcagtgagccttgattgcaccacagcactccagcctgggcaacagagcaagaccctgtttcaaataaataaaaataaacgagagctgggcgcggtggcttatgcctgtaatcccagtactttgggaggccaaggcaggcggatcacttgaggtcaggaatttaagaccagcctggccaacatggtgaaacctcatctctactaaaaaaaaaaaaaaaaaaatacaaatattaggggctgggcacggtggctcacacctgtaatctcagcactttgggaggccgaggtgggcagatcacctgaggtcgggagttcgagactagcctggccaacgtgaagaaaccctgtctctactaaaaaatacaaaattagccaggcgtggtgacgcatgcctgtaatcccagttactctggaagctgaggcaggagaattgcttgaacccggaaggcggaggttgcagtgagccgagatcacgccactgcactccagcctgggcaaaaagagcgaaactctgtctcaaataaataaataaatatacaaaaattagccgagcatggtggtgcacacctgtaatcccaactacttgggaggctgaggcaggagaatcgcttgaacccaggaggtggaggttgcagtgagccgagatcgcgccactgcactccagcctagacgatggagtgagactctgtctcaaaaaaaaaaaaaaaaaaattaaaaaataaatgaggctgggcacagtgtctgatgcctgtaatcccagccctttgggaggctgaggcaggaggattccttgagctcaggagttcaaggccagcctaggcaacatagagatcccaactctacaaaaaatttttttgaaaattagctggccacaaaaaaaaaaaaaaaaaaaaaaagaaaaagaaaaaaagaaaaaagaaaaaaaaattagctgaccatgggggcacatacatgtagtcttagctactccggaggctgaggcagggggattgcttgagcctgggagagagagaggcttcagtaggttatgactgtgccactgcactccagcctaggtgacagggcaagactttatctctaaataaagaaagttaaagtgggttggatccctttgtgaaatacccaggttttgctggtgttggaatcccagcaattccaccttactcaatttgctgaacttctctgagcccccactgcctcgtgggaacaaaagtagctgcctcaagagctgccacgtggatgaatgaggatgaagtgcattagttaggaagggctgggttatgcttagtaacaagcactcccaaagacttcacggccccaacagctaaggtttggttcccatgatggttgttttgtgaagtgaaaatgcagcaaattatgtactgttttgtaatacttctccttggaagggacacatgccacctctgctcacatttcattggccaaagcaagtcacatggccacccccaatgtcagtagggtgggaaatatgattgtcctctaggatcagaaccatctgggcctggtggctggcgcccgtagtccgagctactttggaggctgaggtgggaggattgcttgagtccaggagttggaggctgcaatgagctatcatcacgccacttcactccagcttgggtgacagagcaagaccctgtcaaaaacaagacaaaacaggctgggcgtggtggctcacgcctgtaatcccagcactttgggaggccgaagcgagcagatggcctcaggtcgggaattcaaggccagcctggccagcacagtgaaactccgtctctactaaaaataacaaaaattagatgggcgtggtggcaggtgtctgtaatcccagctactcaggaagctgaggcagaataatcgcttgaacccgggaggcggagattgcagtgagccaaggtcatgccattgcactccagcctgggcaacagagcaagactctgtctcaaaaaaaaaaaaaaaaaaaaagacaaaacagccaggcatggtggctcatgcctgtaatcctagcactttgagaggccaaggcgggtggatcacctgaggtcgggagttcaagaccagcctgaccaacatggagaaaccctgtctctagtaaaaatacaaaaaattagccaggcatggtggcggatgcctgtaatcccatctactcaggaggctgaggcaggagaatcgcttgaacccagaggcagaggttgtagggagctgagatcgcaccactgcactccagcctggacaacaagagtgaaactccgtctcaaaacagaacaaaacaaaacaaaacaaaacaaataatacatgatatgtcagtggttaacaacatgtctggtatacagcaggtgctcaataaatgggcatcattataggagaggcttacaggataaaatggctgacactccaaaccatcatgcttcatgaatggggaaactgaggctcttggctctacccttgcctgcccctccccctgcttctcatgggggaaaaaaaaaagacagcagccatttctgaagaagcatttattagcatgcagggcccatgctagaggctccttatttccagggcaaggccagcgagacagagcccattgctcaggacgcagcccagattgcaaagagaggacagcccatggtagcggaagaaattctggcggagagcactgtacttggggtccttctctcgcagctggcggtagggatcgggaccctggtggctgcctggtacctccccacccaggcctcgctccttctccacggtttgcagggcccacatggcagctgtggtgcggggttccagccagcgggcgttgacagtggccagcgtaaggctcaggaacagcaggtaaagctggcagggagagcagaggagaaggtgagccatgcctgggaggccagaggggccctagggagggtctttctgcatcctcaacagcacaggggtgggggtggggacagcactggatcaaaaaacctgcctccccctctttccttgaacccagactgagggacccaaagcagaactccagctcttctactctgaaactggcagctctgaaggaaaggctccatccccacctcctctatccccccgcaaaacctcccgagcctcttctcctctgatactcagactggaagtccccagagcaggatctctttcctcagtggccacagcccagacgcctgaagctgacattggacccacagagggtgaataaaaagtctttgagtggctgggcgcagtggctcatgcctatagtcccagcactttgggaggctgaggtgagtggatcacttgaggccaggagttcaaggacagcctgggcaacatgggcaaaaccccgtctctactaaaaatacaaaaattagccaggtgtgggggctgtccccctgtaatcccagctactcaggaggctgaggcatgaggattgcttgaacccgggaaggagaggttgcagtgagccaagattgcaccactgcactgcagcctgggcgacagagcaagaccctgtctcaaaaacaaacaaaacaaaacaaaaagtctttgaaggcaggcatggtggctcatgcctgtaatctgtaatcccggtgctttcagagatgggggtgggagcatcacttgaagccaggagttcaagaccagcctgaacaacacagcaaagaccctcatctttttttttttttttttttttgagactgagtttcactcttgttgcccaggctggagtgcaatggcgtgaccttggcccactgcaatctccgcctcctgggttcaagcaattctcctgcctcagcctcccaaatagctgggattacaggcgcacaccaccacacccagctaatttttgtatttttagtagagacggggtttcaccatgttagccaggatggtctcgcgctcctgacctcgtgatccacccacctcagcctcccaaagtgctgggattacaggcatgagccactgcgcccagcctattttttttaattaggaaaaatgtttttgccattctcacattgctataacaccatctctatctgttttaagtatttgaataccttctgagcctgtttcattaaaataaataaataaaaggaaaaaaaaacagtctgtgaagttctagttacccataatcccctcctgtctgtgagattattcttgaaacacctgtcaggtctcacttacccacgtctatgaaacataatgcaggcaagggaaggccagagtaaatagagaaatctgagatgcagagatagtttcttgccttgtggccagaaaaatgtgtggaaggggataggaaaccataaattcccagtcgggctggtttttaaacaataagctggggtcaatgtgccagctcagctgagtcaccacagcttggcagcaggcccagccagcgggaggagagggaacagcagctagcagggagatgctgggggatagacagggctgctggggactgttgtacaggctgtgcactgctcaagggtatccagagcccagctttgtatctaccaggaagaaggggctcccctcccctcccttcctcttccctcccctctcctttcctctcctctcctttcctttcctttttttttttttttttgagatggagtcttgctttgtcgccctggctggagtgcaatggcatgatctcggctcactgcaacctctgcctcctcggttcaagcaattctcctgcctcagcctcctgagtagctggaattacaggtgcacaccaccacgcctggctaatttttttgtatttttagtagagacggggtttcaccatgttggtcaggctggtcttgaactcctgacctcgtgatccgcccacctcggcctcccaaagtgttgggattacaggcgtgagccaccatgcctagcctttttttttccccccctggaaaaggtgtagccataggcgctgactgaggtcctgggaacaagtctccagagggcagtggcactcaaacccacgtacctggctggcctcccagaatgtgagctgagcccaagcatgctgtgaagccaagatgcagaggttgatgaaggcacagcccatggagatgtggaagtagaaggggaagagtttgctctgcactagtccgaaggtatgtcggggaaggcttcggaaaagcaggaagcctgcagggtatggggaccacaggggtgttagggcacttcccggttcccctcttatttccatccccaccccaggtacccatgacatccaagctgagggtccctacctgagacgaaggtcacccacatttgcatgccccaggcacctgacaagaccagtagatggaccatcttaatcaggcctcctaggttcccgccttcctccatcttgcagtcctgggaaggaggcaccgggtggctcagaactttacctttgcctcatgcgtggccttcagaccctgtgagcccgctcggggacagggttacggccaatccagcagagattctggcaaagcatcccgggaatgagagtgagaaaggcccaaagcagtcaaggcccaaagacaaccctcgaccccatctctccaaatgtcagccctcaagatctcaggctctctggacctcaatctccatgccacttcagaggccccaaatttcagccacagcagctccagatcatagccctaggtcttcagagatcactccactaattcccaaatatcaccccagggatccagttctgacagccaagaccactcctctcataaaataataccggatattaggtgaagatcccgaaagccccgaggaaaccctaaatctcatcctgaggacaccgatcccaccaaagccccgaggaaacgccaaatctcatcccgaggacaccgatcccaccgttaggaaccgggacctcaatccgcagcacccggattccgagaacagaggcgtcggggccaaatgggctgaatctggtacctcactcccacgcccccgggtggacagcgaccctcctcggccgcgtcccctcgtgggtttcccccaaccaataattcgtcccgcctcccagctgagcccgaagccaatcgggtcgtagatctgcacctttctatcccgccctcctgggtattgactaatcgtagaaacccccctgggatcccgccccctccacgggcttttatccaattacgccgcggctactaagcgcagctgaagcgtgaaggcgccaatgaggccttcggctactccggcaggggcggaactaaaatgccggccacacccctctctgtgactcagtctctgagcgttttaatacgatggtgtccccgcgggatcaaacttcagcgtcacagctgaggactggcttcgtggtccctgatgggagagcatgaacaggtggtatgtggtaggtggggttctggagcctggcgggtgtagatttcacaacccagggggcggagccaggatgatgaccccgccccctccctaaataattctcccgggagggacacggaagcagcaaccgggatgggacggggagagaggaggcactactggggacctaagctggttctcaaatgcctctccttttcccctccaagcctcccaggcttcctatggtccctaagtcccgggttctcagcgtgacattccagagcaaacacagctccccattactctataccaggcactggcatggattaatttatctaatcacaacatcccagtaaggtgactattatgacatctcgtttttatagttggggacactgaggcatggagaggttcagtaacgcgaccagtattacacagctggaagggacagagctaggatttgaacccaggccatctagctggagagtttccctgcttaaccgtcatactctgctgtccctggaagtgaggacctccctgaggcagtgactctcggaggggcagcttaggacatttcaggcagaagaaaaacgtgtacatcacagggtgggtgtgaagatccagtgaatgcttaggggatgcccggcactcaattaggtgctcagaaaataggagcctaaaaaaggattaaggaagattttactgaagatatgctgaatagtttttgtttgtctgtttgtgtttgagacggagtttcgctctcgttgcccgggctggagcacagtggcatgatatcggctcactgcaacctccgcctctgaggttcaagcgactctcctgcctcacccttccaagtagctgagattacaggcatgcgccaccacgcctggctaattttgtatttttagtagagatggggtttctccatgttggccaggctggtctcgaactcctgacctcaggtgatccacctgccttggcctcccaaagtgctaggattacaggtgttagccaccgtgcccagcctgagtagttctgaagagcgtgtaggagtcttccaggtcgactgaatcaggcagagggcctggcaagggtgacagagagaaaggtctagaggatttgggggaagaggctgagtgtgactcagggcaaggtgcctttcacctagaagtttctccaggcagacctgccccagatatctccatctgtgccatatgtggctatactggagggggaggggagttgaatgtgagacccagagctcagctgtttcctgtttccagcctcttctagcacgggtctgggccccaattcagctaacatttattgaacagatatgccctgcctctcctgctcacactctatggctggcattcacctgtggggccaggtcgaaactcctggcttggccgtcaatgccttactggagctgctctgctaacctcctgctgcttcctctcggacctcgattcagccatcatgaatttaccagcatagagcatgtgattccacacctccaagcttttgcacatgctgctccctgccaggaaaggccttcctttaagccaatgtcaaggtcccttttttctttggactcttctgaggcctgattttttttctttggggccttctgggtccttctcactgcccagcccaaaccttggggctgggataatcttttttgttgttgttttttatttttggagactgagtctcactctgttgctgaggctggagtgcagtggtgcaatctcggctcactgccacctccgcctcccgggttcaagtgattctcctgcctcagcctcccgagtagctgggattacaggcgcccaccaccatgcccagctagtttttgtatttttagtagagacggggtttcaccatattggccacgctggtctcgaactcctgacctcaagtgatcctcccgccttggcctcccaaagtgctaggattacaggcgtgagccaccattgctggccgcgtctggccttgggatcatcttttatccagctttggctcctaccataactgagaagccttgagtttagggctgaggcctctctggcatgtcagggagggtctgggggcactggggacatggggacttatctcaaagcagcccctgcttccctactcacagcgaccctcttttggccggcctaccccgggaccctgactactctgtgtcctgcctctactcacctccctcaccctccagcatgtgtttgcctgctaacatgaagtgtgacaagtactggggttagttagggggctcccatagggctggggacactgggaggggctgggaatgtgaggagtgccctgcactgtccctcaaggaagccctcacccctaggctcttcctcggacaaggctctggagcgtacagctcactggtccaggactccagagccagagaccttgggatgccctgcttctggggacacagtgaggactgcagactgcaggccagggtggggctcagggccttcgccacatgaggctgccccctcccccagtccagacctgcagaagcagtgctgtaatgaccaggacattttgaagaggcatcacaacgtagctaaggtcacccccacccgggaaaccccttcaatgcagaaaaccactgcaatctactgctgtggggcttagggaaggggctgtaaggcagagagactcccatgaatgcacccactgtgtttcttcagcacctagaacagcacctggcactcagcaggccctggctaagcaagtcttaaatgaatggatgaaggaatgaatggaaggaaagagtgtggttgtgtgtcttccatggggatttggctgtgatcgtctctcagccacataagtgcacttctgagcatatgtagcccaagggggaggtgcatgaatatgcctggagtgcagctttgcctgcacttacggtttgggacacctagaactgaggagatccaactcttgtccagccctcaaaactgggttgaggtgagcaaggaggcagctcagggacaaatttctactcccatctcatctctcttccttagaagcccttggagaccagctcttccaaagtcaaaggtgagaaatctcctttccaacaaaactgtgtggggaagacctgctggtttctacctctaccctctgccccagcatcagctgtccccctgccatggtcacccattcactcctgcccaaggctgagtgggcccctgttctatatcttatcccctgtccctactgctactctgagcctttgctgacctctgccctgcccttgccccagaccccaccccttacagccctggctcaccctcttctctgcccacagccaagaccattgtgatgattcccgactcccagaagctcctgcgatgtgaacttgagtcactcaagagccagttacaggcccagaccaaggtgaaccaccttggccctgcccccagcaacctctgtttctccttgccctcccctccttcctcccaccccaaggctgacctctttcccccaggctttcgagttcctgaaccactcagtgaccatgttggagaaggagagctgcttgcagcaaatcaagattcagcagcttgaaggtgaggactgaccagagatcaaggtcaggctaggccaggcgtggtggctcacgcctgtaatcccagcatttggggaggccaaagaggttggatcacttgaggtcaggagtttgagaccagcctggacaacatggtgaaaccccatatctacttaaaaaaaaaaaaaaaaaaagccaggtgctgtcactcatggctgtaatcccagcactttgggaggctgaggcaggtggatcacctgaggtcaggagttcgagaccagcctggccaatatggtgaaaccccatctctactaacaatacaaaaattagccaggcgtggtggtatgcacctgtagtcccagccactcaggaggctgagaaaggagaattgctttctgggaggcagaggttgcagtgagccgagatcacgccactgcactccagcctgggcaacaaagcaagacttcatctcaaaagaaaaaaagtcaggctggaagctggtcctgttgggatcagctgggccaggccagggtgagggaaattgggagagtctgggttctgggtcaagattaggacaagctgggttcagggtgggatcagggctcagtcaaggtcccacactctctgcagaggtgctgagccccacaggccgccagggagagaaggaggagcacaagtggggcatggagcagggccggcaggagctgtatggggccctgacccaaggccttcaggggctggagaagaccctgcgtgacagtgaggagatgcagcgggcccgcaccactcgctgcctgcagctgctggcccaggagatccgggacaggtcggggatggcgggagggcagcttggagtccacaggagggaagggagacccagaactggggaatggaggcaggatgggggaaatggcagatgcctgggggagggggactgagggatggtggaaagcctgagggacaagaagagggaatgaggccgggtgtggtggctcatgcctgtaatcccagcactttgggaagccgagatgggcggatcacctgaggtcaggagttcgagaccagcctggccaacatggtgaaaccccatctctactaaaaatacaagaattagtcaggcatggcggcgggtgcctgtaatcccagctactagggaagctgaagcaggagaatcactggaacccaggaggcagaggttgcagtgagctgagatcgcaccactgcactccagcctgggcgcctgggcgcctgggcggcagagcgagactctgtctaaaaaaaaaaaaatgaggaggggatgagaggctcaggggagacaggtggctggtgggggcgggggagtgggaaactgagaggccagaaggcagggaagacagaaagctggaggtgggatggaaaaggaggccaggggatcagaaagggggatggcagggaagactgagaggacaggagactgggggtatagaaagtcgggggacaggaggtggggaggtggaggccaggtgataggaggctgagtggggtgggagagactgagagaatgggaggctggggatcagaaggagaggagggggatgagggtagggggattgtagaaggggaggggaaaagggcagggaagtgtggggaggggacagagcttgcggggatgggtggaggcacagataggggcatgggaggtcaggggccaggcagggagtgcaggtctaggctgcactgtcccctcagcaagaagttcctgtgggaggagctggaactggtgcgggaggaggtgaccttcatctatcagaagctccgtgagttcctggagcccacagccggtgtgtggggagggggtccttcttcagcctttgtccgcctgagccccctccctccacagaagcgcaggaggatgagatctcagagaacttggtgaacattcagaaaatgcagaaaacgcaggtgaaatgccgcaaagtgagtggaggagatggggaccctggggaggagtgggagagggagggatggggattttggccagcctccaccatgagattggagcctgggttcaaatctcagctctgccactcactgctgtgtgactgtgggcaagtcacttgacctctctgagcctcagtttcctcatctgtataatggatgtaataataactcatcttggctgggcgcggtggctcacgcctgtaatcccagcactttgggaggctgaggtgggtggatcagaagttcgagaccagcctggccaacatgatgaaaccccgtctatactaaaaatacaaaaattagctgggtgtggtggcaggcacctgtaatcccagctactcaggagactgaggatggagaatggcttgaacctaggaggcagaggttacagcgagccgaaatcgtgccattgcactccaccctgggcgacaagagcaaaactcccatcttaaaaaaaaaaaagaaaaaagaaaaagaaaaagaaaactcatcctgttgggtgctgtggcatgcctgttatctcagcactttgggaggctgaggtggttggattgcttgaggccagaagttcaagaccagcctaggcaacatggcaaaaccctgtctctacaaaaaacaaaaaaaacaagagggtgtggtggcacatgcctgtagacttagctactcagaaggctgaggtagggggatcacttgagccttggaggttcagggtgcgttgagccctgatagtaccattgcactctagcctgggcgacagactgagaccctgtctcaaaaaagaaacaaacaccaaaaacaaaaacaaaaaacaaaacaaaaaaaaacactcctccctacctgatcaggtgtctgtattagctgagtactgtgcacttgaatgcagtctggcatataacaagtgctatataacagtcaccttttactattatcattattattatttattttgttttcttttttgagacggagtttccctcttgttgcccaggctggagtgcaatggcgcgatctcaactcactgcaacctctgcctcctgggttcaagcaattctcctgcctcagcctctcgagtagctgggacaacaggcgcccgccaccacgcccggctaactttttgtatttttagtagagatgcggtttcactgtgttagccaggatggtctcaatctcctgacctcgtgatctgcccgcctcggcctcccaaagtgctgggattacaggtgtgagccaccgcgcctggcactattgtcattattattatgactgctgttctctcatccctccccaccccagatcctgaccaagatgaagcagcagggtcatgagacagccgcctgtccggagactgaagagataccgcagggagccagtggctgctggaaggatgacctccagaaggaactgagtgatatatggtgatgcccagcctgcagtctgacccctgaccctcctctgaacccgttcccccaacgggatctggcagtgaccaccagaacctggagcccacctgagtccagacttccctcaccccctaggactcaccccaccacggcccccaaccttagctgtactgctgtctacaccctgagcagtgtggagtctcccagcgcccccagctccttgtcttcttgcaggtctgctgtgcacgtgctgcagaactccatagacagcctcactttgtgctcgggggcctgtcccaaggcctcgagcctaagaggtgagggaggctgagaattgctcaggggtgggaggtcattgtctagcttcacagggaggctatgttcagagagcctatttgggagtcacatctgatgggtgttattctatggtcacattaagtagtgttctggggtcacattaaggagtcactggaggtttcatccaggagtcattcatggtcacattcagagtcacttggatcttatatgagtccatggggactccacacagtggctcatgcctgtaatcctaatattttgggaggctgaggtgggaggattacttgagtctaggagtttgagaccagcctgggcaacacagtgagaccccatctctccaaaaaatttaaaaactagctgggtgatggtgcacctgtggctgagcacacctgtagtctcagctactcaggaggctgagacaggaggatcgcttgagcctgcgaggttgaggctgcagtgagccataatcgtgccactgcactccagtctgggcaacagagcgagaccccatctctaaaaaaaaaagtgtcaattgggtaaaatgcaagggtcattgaagtcataatttggtgtcacactggatcacattcaagggaattgggggtcatggtttaagtatcaatgaggtatactatgaagggacacagggcctatatttgggggttacttgagggtcacattcagggaacctgtccctcctgcaggccacaaggggcaccagtgcctgagccctccactcccctcctgggactctgactccgactgtgaccaggacctctcccagccacctttcagcaagagcggccgctccttcccacccggtgcagatcctccccagtccccccctccacccatttccctcctgacctgcccttgactcccacagtctagaccctcagaacaggcccagatcctgatctgggcatgcggtccctgacctgcagccccggagtcccctggacctggccaggccctgacccaccctctctctccacagcttgagcagccgggactgctctccctgaagacccctccagagagaaaataaactagcccagaccctcctctagccccgactgttagtcttgctgcttcctgtgcctaggaatccccctgccctcctagtttacccctcattgttgggggggaggggtgtagagaccccaggggtcattcgggatgtgtgggcttggaatcaggggacatctgaagccagatttaatatatgacaaggcaaggagtcattctgtccagacacgagcagccagacagacttccacactggccacagagccttcctttctggggggccctggcgaatggggaaactgaggcccagagagggagaggcgcggcccagggacatactctgaagcccctccctcctattaccctcggagccccgcccaccccagggtcctccctctctacttccattcttggttccttcctacaatcgatgctaacacgccccgcctccaagatcacggaggccccgccccacggggctatgcaaatgagacgcccggaggccccgcccctccctccacctcggagtctgcgcggcgcggccaggcccggccgaccgcgtctcggtcttcgcgtctgccagcctggctggcagtccgtctgtccatcccgccgcgccggggcagtctaggcggagcgggggctcaggcggcggcggcctcgacgcggtgagaggagggggtgggggcgcccctcatcccctcccgtgggcttcccacccccggtgtcggtctccggttcctgagggttgggtccctctgggtccagcgcggggaggggcgggggaggggaggcggcgagctgggggaggggaccgggctgggggaggggaccccgggccgaggagccagcaccggtggtgagggcggctgtgggtaactgtgattgtgtggttgtcattgtgtgtctgtgtgtggttgtgtaactgtcatcgtgtggctgcatgactgggattgtgtggtttcgggaggtccgcgggtgtgtgtgtgtgtgtgtcactgtcattgtgcggctgtcgttgtgggtgtcactctgatggtttgtgtgtgtgtgtctggctatgctgtgactgccattggccccccgtgtggctgctgtctctgtgtgtgactgtcttggtgttcgtgtggttgtgtgcataggactgtcattgtgtggctcctgttgtgtgttcattctgatggtgtgtatgtgtgtgtggctgtggtcgtgcgctgtgcacctttcttgtgtggcattgtgagtctgtgtcatggtccatggatgtggccatgtggttgtagatggcaccttgtctctcccctgtgactgttggtgtgaataagagactgttagtgtgtgtgtggctgtcgctgagtgccttgtaattgggggtgtgacgctgtgatgagttctgtgacccccattgtgtgcggtgactcttttctgtgactcttaagtgtgttgcaggcctgactgtgtgtccctgactgtagcggtgtgggggcttgtgtgggactgtgatgtgtgtagggtctcctgacatgtctctctctgtttggcctggggtgggggtggggacttgtttgatctgtttggtgtctctgacaggctatgagcccactgtgtgtgagtatgcagtgacatgtgttgtgtgtgttggacacctgtctgaacaagggggcccctcttgtttactgcaaagtggcgcccagcacagcgcctggaagtcggcaggtgctcggtcttcactgtgggatgggtgaacgctatgccatggttgtgtgtgtgtgtgtgtgtgtgtgtgtgtggtgccaggatggaggctgcggctgggttgtgcttcctaagggtgacagcatgggtgactctgggtatctaggacctctggcaaccatcaccccatatcacactgcagagtgagtgtcgtggttggggtgctggacccagagtgcctaccctcgcctgcctgggcctcagtttccacatctgcacaatgggggtgaccatccctgccctgctggctgccaggagcggctgtgagtcttcaggcgtggatgcagcctgggggaagccatagggcgctttcacaggtgagatggggctgggagaatggatgcaagcaggtgtgactgtgttgagccctaaagcgctggggactgggggtagccttgggggagggaagaggagaactgggaggcagaccggctgggaagagggggaaggagggagaggcagttggcagagaaggagggcttggctatcagcccaaccagacaccaacaccacagcccatggggacagagagaggggcccctgcagaggccatggaggaagcgactcaggggaagggtctggtagggatgggggccccttgggaaagaggatggtgtcccctaaaaactagtggggacccttctaagtgccatgggggaggggttcccatgaggctggggagtctcttctaaaggcccacctcctaaagggcattgggtcagagcctcccatgtaggctgtaaaggaagggacccccgtagactcttggggagtggtgtcagaggaggcaggtgtccccagtagggtcaggaccaacagggcaggacctggattgcagaggcatggccagaaggttcaagggacagagtcagggcctccccgggtcttcagggccaggggtgtggccaaaggactcaggggatgaagccagggtcccggtgacctgagccttcccctaggcacaccccctgggactcccactccctccccacctctgcaggcctggccttcaccatggcgggagggagaccgcatctgaagaggagtttctccatcatcccctgctttgtcttcgtggaggtgaggacccccgtacctctcccagagacggcgtgcctatctctgtctctgtccaacctcagtctccttatctgtacccacttttccatctctgggatctcccttgctgtcccctttctcttgagaaatggttatgagcttagattcagaagtgccactccccggggtccaatccctctctgccccatccacactgcagggtgctggacaccacaggtaccctcctgagccacagtttcctcattcataaaatggacatcaccagagtcccaactcatagggctgttctctgtgtgtgtgtgtgtgtgtgtgtgtgtgtgtgtacgtgtgtttgagatagggtctcactctgtcacccaggctggagtgcagtggcataatctcggtttactgccacctccacctcctgggctcaagcaattctcctacctcagcgtcccgagtagctgagactacaggtgtgtgccatcatgcccagctaatttttgtactttttggtagaggtgggatttcaacatgttggccaggatggtctggaactcctgacctcaagcaatcctcctgcctcagcctcccaaagtgctgggattacaggcgtgagccaccacgcccggcctcctagggctgttctaaaggtaaaatatattaattcatggacaaagcttggtacgaccccctgcccacagtgagggttacacctgtggtagctgctagcacccctacttctctgatttctttccatgtgggagagtctctccacctccccctgtctgtctgtctctcatttgagccttggccctaatctcactctccccatgcccatctcttctctccctctctctacaactcccttcccttttcctttcccttctctttcctcttgctttctcctcttctcccctcctttcctggctttcctctctctctgttttttttttttcacttcttccttttctttctttccctccctccctctctctctttctttcttttgtgatggagtcttgctccgctgcccaggctggagtgcagtggcacgatcttggctcactgcaaactccgcctcccgggttcaagtgattctcctgcctcagcctcccgagtagttgggagtacaggcgtctgccaccatacccagctaatttttgtatttttagtagagacagggttttgtcatgttgtccaggctggtctcaaactcctgatctcaggtaatccacctgcctcagcctcccaaagtgctgggattacaagcatgagccacgttttaattttttttctttctttttgtctttcagccattccttttcctttcttttttttctgagacagggtctccctctgtcacccaggctggagtgcagtggtgccatcatggctcactgcagccttaatcctctgggtgaagcaatcttccttcctcagcctcccaagtagctgggactatagttgtacagagataaggtcatgcgatctcaaactcctgagctcaagggatcctcttgcctatgcctcccaaagtgctggaattacaggcacgagccgctgcacacggcccctctgtttctgtctccttctccttctgtttctcctaagccctgacccttctctcacctcctttccccatttctctcagtctctctcccccttgtctctgtctctctccatcttctagtttctgtctctaacccatgtttctccatctctgtatctctgcctctgtggcctcagctggagtcctgacctctctcttctctctccgccacctctccccgccctggcttggtggcagtcggtgctgctgggcattgtgatcctgcttgcttaccgcctggagttcacggacaccttccctgtgcacacccagggattcttctgctatgacagtacctacgccaagccctacccagggcctgaggctgccagccgagtgcctcctgctcttgtctacgcactggtcactgccgggcccaccctcacggtgagacaatgaagacctcctaggaggcaggtgggccggtaagggtgggtgaggggatgggctggaaggccagaagactccatcttggtcttgcccacagatcctgctgggagagctggcgcgtgcctttttccctgcaccaccttcagccgtcccagtcatcggggagagcaccatcgtgtctggggcctgctgccgcttcagccccccagtgcggaggctggtccgcttcctgggtgagagacatggcctggggtcagccccatggtaatggtggggaggtgggtatagaagaaaagagtcatgggcctgacagtcataataattccaggctgggtgtggtggctcacgcctgtaatctcagcactgtgggaggccaagtgggcgatcacctgaggtcaggagttcaggaccagcctggccaacatggcgaaaccctgtctgtactaaaaacaaaaaattagctgggcgtgtggcaggtgcctgtaatccttgaacccgggaggcagaggttgcagtgagccaagattgtgccagcctgggcaacaagagcaaaactccgtctcaaaaaaaaaaaaaaaaagaagaattccagggaaaagctgggcatggtggtacatgcctgtagccccagctacttgggaggctgaggcagagactcagctacttgggattactagctacttgggagactgaacaagatcccacctctttaaaaaaaagggaattccaggggggaaggaagaggacctggaattgccatgatggggatgttaggaagcaacaagggacttaggctcagaccagatgtaatggaggttctagggacatgggtggggcctaacccaaccatgatggcaactgtcggaagagggtcccagaatgccataaggagagtctcaggcacaaaagagagacacaggcacaggacaaacaccctggggcccctgggtgagactctggctgtgctttaaatggggtcccagcctcaagtagtggctgtgggaaagggggaggggcagaccttacctataatgatggtcccagggcagagggcgggagacccagctctaacttattagtggccccaggaggagagtgttgaactcagtagtagccagtttaggggcaggcaggaagagccccaggtatgccattagggttttccctagccgtcctaggcatggggtggatcctgatgtaatggtgttggggcgggggtccaagcccagctataatggggctccaagggaggatccgcccctgacatagtggtaatcctagaaagacaggggccagataatgagggtccctgggggcaggaggcctcagagtaccttcatggtggtcttaaaggaagggggatgttggcacaactacagggtcccaagtgtgctttaatgacagtcacaggaaaagggagctaagaggcccaatggaatcagtgggagcatcagggcctggcgcatgaaccccttccactatcccacccctaggggtctactccttcggcctcttcaccacgaccatcttcgccaacgcggggcaggtggtgaccggcaatcccacgccacacttcctgtccgtgtgccgccccaactacacggccctgggctgcctgccaccttctccggatcggccaggtcccgaccgctttgtcactgaccagggtgcctgcgctggcagtcccagcctcgtggccgccgcgcgccgcgccttcccctgcaaggatgcggccctctgcgcctacgcggtcacctacacagcggtgagcttcgggagcttcggggtcggaaatgggtgtgcaggctggacagcgaccagcagctaggaagccgccagggttggagcctctgctcttccacgccccgggtgctgttggaagctctcgctccacgccccgacctgttggaagctctccctcctcctcccagatcctagccacgcccccagtcagaggctatcgctgtccattgactccgccccttgccctctggccacgcctcctgagccagtaatgcgagggaaactgttggctctaccctatggcatcaggacagtccctgatgtgcaagactcggaacccctatagcctagccaggcccccaggatgctacaggcgctagatattagctggcagactgggcagatgggacggccccctggagtccttgcccctcttctggagcccttgcccctctcctgggggccttgttccctcctgttgtagccctggccacgccccttgctcttaactgctctgggatttctaactctgtcccctgctttttcctggtcacatcccctgttgcttcaactcttttttctggcatccgggtttatgctcccaccctgtcagtggtcccctaggggtcaggggctccacctcctacagctcctacagctcctacagctcccttcgccctgactccaccctctggttctgtggccacgccctaatccagtaagtgtctgtccccatctgcgactccggaccagggacacctgggccccagaccttgtcctctgctcttgggagctctggccacacctagccctgcaggtggtgcccacgagactccaagacctcaatccctgacccccccccctttgcctttttggtcacgctccctggaaaagcccactgggagcccatgactccaaccctggagcccctggccactccctccagccccaacgctctggccatgcgctctagcccagaaaggagcgtccacttgggttcggcgacttgcctccgctatccccctgaccagtccggctccccgcagatgtacgtgactctcgtgttccgcgtgaagggctcccgcctggtcaaaccctcgctctgcctggccttgctgtgcccggccttcctggtgggcgtggtccgcgtggccgagtaccgaaaccactggtcggacgtgctggctggcttcctgacaggggcggccatcgccacctttttggtgagttgcctcctcaaccttcccagcatggaagaccctcaccagctctctgacccaagaggcaggaccacatgatggagaagggtgtggactctgtgtgaccttgggccaatcccttaacattacccttcctggatattctcatctgtgaaatgagataccaggatcagggtgaggcaaggccttgaatgcaaattttaagagggtgcccaacactcagtaatcaagattaatattttaacaaaacatttttaaaaatcaaagttaatacaaaactatcataatgtacagaatataaaaattctaaataaagatgaatcaaggctgggtgcggtggctcacgcctgtaatcccagcactttgggaagctgaggcaggcggatcacttgaggccaagagttcgagaccagcctggtcaacatggccaaaccctgtccctgctaaaaatacaaaaattagccaggcatagtagtcccagctacttgggaggctgaggcagaagaatcgcttgaacccgggggacggaggttgcagtgaactgagatcgtgccacctcactccagcctgggtgaaagagcgaaagtctgtctcaaaaaaaaaaaaaaaaaaaattagctgggaatggtggtgcacacctgtggtcccagctactcaggaggctgaggcaagagagttgcttgaatccaggaggtggagtttgcagtgagctgagattgcaccactgcactccagcctgggtgacagagtgagactgtctcaaaaaaataaaaaattaaaaaaattaaatcctgccactgtacaacttggtcttacttactttagcctagtgtggggtctgtgggataaataataattgcacctacctcagtaaaatggaaccaacagtgcctggcacatactatgcattagctgtttttgaaaaccggagcctcactttccttatctgaaaaatggggatggtatttacatggctcctatgtgacttgccccaggcctcaacactctcctctccctctattccaggtcacctgcgttgtgcataactttcagagccggccaccctctggccgaaggctctctccctgggaggacctgggccaagcccccaccatggatagccccctcgaaaagttaagtgtggcgcaggtaaggggggccgggggctgctcccggctggagagggtggtgggtggagggggccaaggagacaggaaggaagtcaggcaagaggtgggggtctcagaaccatggggaagtggagggatcacccatctctgtggacataggtcctgggcggacagccccaaagaatgaaagggagcacccccgtcttcttcccagggggacacggttaatcatgagaactgtggttgtcttttccatggggctcttcacctgatgagctccttgtggctgtggccggtagggcccagggggccactagccccttccgtctgtctctttgtctcaggaacccgaggtctgcaggccgcattcgacaccggcacggctcaccccatccagtgagtgttgggggagtggggggctaaacagggggacttccaggtgggcagccactgccccagaggtctcacctaggcctttatgctgcctcccgagttttctgatcccctgatatctggcttctgaccaccagagtcgcagaactgcgcccgccgtggccacctgatccccagctgtgtctcctccagggccccagccatgtgttcgtcgccccgtgtgccccgtcctcgattgaggtctgagccgacgcccttgcccctgcccctacccctgccagcgcccacccccagccagggcccctcgccttcctcccctggacctggggggccaggcgggggtggtggacgtggccggaagctgctgctgcccacgcccctgctgcgggacctgtacaccctgagtggactctatccctcccccttccaccgggacaacttcagcccttacctgtttgccagccgtgaccacctgctgtgaggcccgaccacccacccagaatctgcccagtccccacttcttccctgccacgcgtgtgtgtgcgtgtgccacgtgagtgccaaagtcccctgccccccaagccagccagacccagacattagaagatggctagaaggacatttaggagacatctgcctctctggccctctgagatatcccgatgggcacaaatggaaggtgcgcacttgcccctactattgcccttttaagggccaaagcttgaccccattggccattgcctggctaatgagaacccctggttctcagaattttaaccaaaaggagttggctccaaccaatgggagccttcccctcacttcttagaatcctcctgcaagagggcaactccagccagtgttcagcgactgaacagccaataggagcccttggtttccagaatttctagagtgggtgggcatgattccagtcaatgggggaccgcccgtgtctaagcatgtgcaaaggagaggagggagatgaggtcattgtttgtcattgagtcttctctcagaatcagcgagcccagctgtagggtggggggcaggctcccccatggcagggtccttggggtaccccttttcctctcagcccctccctgtgtgcggcctctccacctctcacccactctctcctaatcccctacttaagtagggcttgccccacttcagaggttttggggttcagggtgctgtgtctccccttgcctgtgcccaggtcatcccaaacccttctgttatttattagggctgtgggaagggtttttcttctttttcttggaacctgcccctgttcttcacactgccccccatgcctcagcctcatacagatgtgccatcatggggggcatgggtggagcagaggggctccctcaccccgggcaggcaaaggcagtgggtagaggaggcactgcccccctttcctgccccctcctcatctttaataaagacctggcttctcatctttaataaagacctgtttgtaacagaagtttggccatctgccttcctcccccgggtggtgggggggtgcggaggacattcatcgtgggtctagatgtctgtggagctgggtgtgggtgtgttgccgcagtgtatctaaggacaattgtggaaaggcagcccggtttcatggagcttcagacttgggctgaaatcctggctcagcattctgggctctgtggcctcagaaaagttcattcacctctctgtgcccttgtttcttcatctatcaaaggcaaacagtcactcaagctaccaaggcacacaaacccacatcaggagccgtacatgccctgtgtgtctcaggccagggcacagagggcacaaggaatggggtgaggatacttgggggtcctgagagggatgggggatgctgaggggcactaagaacctccaagtggaacacctggctgtgtggatgagaacaggggtgctgagtatgagattacaccaagacccaacccccctgagaactcagcagatactggggatgttcaaagggtcagggagagggagccacaggacccctccctcaattgtggctctgagggctttcagacagggcatttgggacccagagtcactcaggaaccaggaaaagggagtctgtttcccttctctccttaattaattcactcattcattaagcaaacactgtagaacccctactgtgtgctagatggtcttagtctgttccagctgccgtgacaaaataccatggacaggatggcttatttattaaattattaaaaaataaatttctctactactattaaattcctctactaattattaaaaaataaatttcttggctgggcatcgtggctcacgcctgtaatcccagcactttgggaggccgacaagggtggatcacgaggtcaggagattgagaccatcctggctcacagggtgaaacctcgtctctactaaaaatacaaaaaattagctgggtgtggtggcgggcgcctgtagtcccagctactcaggagactgaggcaggggaatggtatgaacccgggaggtggagcttgcagtgagccgagatcgtgccactgcactccagcctgggggacatagcaagactctgtctcaaaaaaaaaataataataataataacaataaatttctgatttatttatttatttattttgagacggagtctcgctctgttacctgggctggagtgcagtggtgcgacctcggctcaccgcaacctccaccttccaggttcaagcgattctcctgcctcactcagcctcctgagtagctgggactacaggtgcgcaccaccacgcccagctaattttttgtatttttagtagagacggggtttcaccgtgttagccaggatggtctcgatctcctgaccttgtgatctgcctgcctcagcctcccaaagtgctgggattacaggcatgagccactgcgcctgccttatttttattgtgtgtgtgtgtctttttttgttaagatggagttttgctctgtcgccaggctggagtgcaatggcacgatctcggctcactgcaacctctgcctcctgggttcaagcgattctcctgcctcagcctcccaagtagctgggattacaggcacccaccaccacgcccggcaaatttttgtattttcagtagagatggggtttcaccgtattggccagggtggtctcgaactcctgaccttgtgatctgcctgcctcagcctcccaaagtgctgggattataggcatgagccgctatacctggcctatttttttaatagagacagggttgtgccatgttcctcgggctggtcttgaactcctgggctcaagtggttcacccaccccagcctcccaaagtgctgggattacagacatgagctaccacccctggcctaacagaagtttattgctcacagttttgaaggctgggaagtccaagatcaaggccccagcagattcggtggccagtgagggcctgcttcctcatagactcactctagtctcacatggcagaaggtggagaagctctctggggcctcttttataagagcactaatcccattcatgaggactccacccttatgacctaatcacctttaaaaggcccccacctcctatcactgtgggttaggatttcaacatatgaaccgggggaaggggcacaaacattcagaccaaagcacaggtgctgtttagttaggcacagggtgggggttgtggcagggggaggttacagcagtaaacaacagacacaaacctctgctgtcacggatgtgagcgttctaatatgtaagacaacaaacaaggtaaatggggcctggtctccacacctgtaatcccaatactttgggaggccaaggccagaggattgcttgagcttaggagttggagaatgacctgggcaacatagtgagacccccgtctgttcaaatatatatatatatatatattttaaaattagctgggcatgttggtgcgtacctgtagtcccggctatgcaggaggctgagatgggagtcccttgagcccaggaagtcgagactgtcgtgagctgtgatgatgccactgcactgtagcctgggtgacagagcaagaccatgtctctggataaataaatacacaaattaataaatataaaaataaacgagctatatacagattcacaattccaaatttttatagaagtctgaaaaccaggccaggcgcagttgctcacacctgtaatcccagcattttgggatgctgaagtgggcggatcacctgaggtcgggaattcaagaccagcctggccaacatggtgaaaccctgtctctactaaaaatacaaaaattagctaggtgtggtgacacacgtctgtaatcccagctactagggaggctgaagcaggagaatcgcttgaacccgggagttagaggttgcagtgagctgagatcacaccaccgcactccagcctgggtgacagagtgagactctgtctcaaaaaagaaaaagaagtctgaaaaccaaaatcctttcataactcatttatggcaaaacctaacctgaactgacctgagattatatatagcttttatttatttcacttgatgtgaatattcttgtgttttgctgaagataaagtgacttgaggattttactcctggtcccaccaggggtatgaaatacatagtatttataccctattacttttttaaaatctgaaaaatcctgaatttccaactccaggatcatggatttagctaagggatctctgatatgttagatatcgatatgtgataaggagaacactcaagctaaggaagccgatgtgacaagtgtgggatagggacatggtttgcaatttttttaagagagagggagggtctcgctctgtttgttgcttaggctgagcgacgagtggaatgcagtggcatgatcatagctcactacagccttaaacttctgggatccagcgatccagtgatcctcccaagtagctgggactacaggcacacaccaccatgcctgctaattttttaaatttttagtaaagacaatgtcttactatattccccaggctggtcttcaacttcagggctcaagcgatcttcccacttcggcctcccaaaatgctgggattaaaggggtgagctgccatgcctgggctatggtttgcaatttttaaaaaagtgatcaaggaagttttctctgagatgacactgggagggagggagccatgcaaatatgtggtggggagacctctaggcaaagggaagagcaagtgcgaaagccttgaggtgggaacatgccttctgtgttcagggaacagcaaagtggcctgtgtagtagttggcacagggtgagcaaggaggagacagaagaaaaggaggctggggagacggtggggaagttgaggagatggtggagctgatcatgggccactggggggatgagatgagagcatcagatagctgatggcagaggaaagacagcatcatgaggccccctgattgactgaccaaggctcctgtttccagagcttatacacctgagacccgtggtctctcctgacacacagctgtctccactggggccaggaagaaagcaaagcttcagcacaacggacagcgccaccacccaaaccagcaggccctgtctgtgatgctgacgcagagcgctggccaacaatgggaatagtgggggaagaatcaggtcccattcaggagggtggtgacagcagccctggccttgcaccaacccccatactgggatagatgatcttagagaacacaggctggcttgtacctgtttgggattggctgggcgtggtggctcacgcctgtaatcccagcactttgggaggccgagccaggcggatcacttgaggtcaggggtttgagaccagcctggctaacatagtgaaacaccattactactaaaaatacaaaaaattagctgagcgtggtggtatgcgcctgtaatcccagctactcaggaggctgaggcaggagaatcgcttgaacccaggaggcagaggttgcagtgagcagagatcatgccattgcgctccagcttgggcaacaaaagcgaaactccagctcaaaaaaaaaaaaaaaaatgaaagccttctcagctgggcacaagtggctcattcctgtaatcccaacactatgggaggtctaggtaggaggattgcttgaacccaggagtttgagatcagcctaggcaatgtagcaagaccctgctctctaaaaagtaaagcgtttaggcctggagcagtggctcacgcctgtaatcccagcactcagagaggctgaggtggcagatcacctgaggtcaggagttcaagaccagattggccaacatagtgaaaccccatctctactacaattacaaaaattagccaggagtggcagcatgcgcctgtaatcccagctactcaggaggctgaggcaggaaaatcacttgaacccgggaggcggaggttgcagtgagtccagatcgcaccattgcactccagcctgggtgacagtgcgagactcggtctcaaaaaataaaaaaacgacaacaacgacaacaaaaatcaaaagccttctcaacatgcccctgtgggtctcacagcatctcaatctcaagttgactaaaacagagctctctgatttagaatgtcacaacacaactatcccaggcacagagctctctcctgtctcctcatgactcgagtaaaagccaactttctcccaatgcctcagggcccttgcactgaatgaattctccacctagaatgttcttcccctgcatatttgcacagttcacaccctgacctctctcaggccttttctcaaatgtcgccttcccagcctgacccaaccaccctattcaaaattgaaaaaacaactggcccttccttctaacttcccttccttgtgcaaatttcttttctttttttttcttttgagatggagtcttgctctgtcacccaggctggaatgcaatggtgcgatctcagctcactgcaacctccacctcctgggttcaagtgattctcctgcctcagcctcctgagtagctgtgattacaggcgccccaccccgcccagctaatttgtgtatttttagtagagatggggtttcaccatgttggtcaggctggcctcaaactcccgacatcaggtgatccgcccgcctcagcctcccaaagtgcttggattacaggggtgagtcgccgtgcccggtcccttgtgcaaatgtctttttgcctatgcttgtcatgtgctcacagtgtttcaattcctcgtgatgctcagtgggtctttataggtctccctcactcggatgtcgctccaccaggacagagatttgatctgttgtctgttcactgtggggtctacagttactagaatgggccctgatacatagtagatactattgcttgaggatgccagtaaactaaggataggcacagagtgaccccaagccacctagttcctaccctgtagccccaggtccaaccctacctgcaggcaggtacattcctccatgattctcctctatggtaaatcttcttctgtcaagatgtgaagacaggccagacacagtggctcatgcctataatcctggcactctgggaggccaagacaggcggatcatctgaggtcaggagtttgagaccagcctcgccaacatggtgaaaccccatctctactgaaagaaatacaaaagaaaaaaaaataagctgggcatagtggtgtgtacctgtaatccaagctacccggaaggctgaggcaggagaattgccggaacccgggaggtagaggctgcagtgagccgagatcgcgccactgcactccaacctgggtgacagagcgagactccgtctcgaaaaaacaaaacaacacaacaacaataacaacaaaaacagataatcagttaaagagtgaaatgtgtgcaattttgggcaggcagtcaggggaagcctctctgagtagatgatattttgaccaaagacctaaaaagagtggagggaaaaaaaagtcggctggactcggtggctcacacctgtaatcccagcactttgggaggccaaggcgggcagatcacctgaggtcagaagtttgagaccagtctgaccaacacggagaaaccccgtctgtaccaaaaatacaaaatcagccgggcgtggtggtacatgcctgtaatcccagctacttgggaggctgaggcaggaaaatcacttgaacctgggagacggaggttgtgatgagccaagattgcaccattgcactccagcctgggcaacaagagcaaaactccatctcaaaaaaaaaaaaaaaaaaaaaagccagaaggatatctggaagctgactgctgcacacacaagaacatcaagtgcaaaggacttgtggtgaggctgtattcagcatgctcccatgtatgtaactgtgctggactctgtgatgtgggtgtcactactgagtatttgtgcatttttgtttgtttttgttgagatagggtctcgctatgttgcccaggctggagtgcagtggcacaatcactgctcactgcagctttgacttccttgggctcaagcaatcctcctgcctcagactcccaaggagctgggactacaggtgcacgccaccacacctggctaaatttttttttttttttttgagacagagtctcgctctgtcgcccaggctggagtgcagtggcgcgatctcggctcactgcaagctccatctcccgggttcacgccattcttctgcctcagcctcccaagcagctgagactacaggcgcctgccaccatgcctggctaatttttttttctatttttagtagaggctgggtttcaccgtgttagccaggatggtcttgatctcctgaccttgtgatctgcccacctcggcctcccaaagtgctgggattacaggcgtgagccaccgcgcccggccaacacctggctaattttgaagtattttgtagagatgggggtctccctacattgcccaggctggtcttgaactcttggcctcaggcaatcctcttgccttggcctcccaaagcactgggactacagacataagccaccacacctggcctgtatgtgcatttggagtgttgaaatgtgaggtgaatcatgcgttgtatatctgctgggggatgggggctgaggtggcgtgtttgacagcgcagtgtatcggtgtgcttcactgtgtgtgtctgtgtgtgtagtggcaatgtcatagttgcgtgttttgcaagagaaagggtgtgggggatgaatgtgggacagagtttgtatgggatgctttgtgtcaggatagggcaaggttggagcatgtggatgatggggattctgaaagtagaatatattcagagatgccatggtgtgtgtgtgtgtgtgtgtgtgtgtgtagaggggtgtgagtgagcccagctgtgtgagtgggtgtgttgggggatgtcgtggagctgttttctggtcccagagggagagagaaagcccaggaaatctcactttctccctgcccctgggtctccaggcaacggcaccactttggagttaccaggagacaaggttgccagggcaacacaggcgtgagtggcagctctggggcgaagtctgggtgagaagatccagccagggatcacgatcattcactttgttcctccctttctccctgtttctcatcaatcccacctcccttccttcattgtcttaacgagcacgtatttgagaacctacaaatgtgctaggtgctattctcggtactggagaacagaagtgaacaagacaatgtccctgctgtatctctccttcagtcttccagctcctgtctctttatctctcctgcttccttctttgtcctgcggtcctgccttccccccgtaccacaaaggcggccccacagaaccccttagccagtgaggaagtaagttgagaggcttcatctcacagactttcggggatggccgttgatgttttgtccacgagcctgtgtccccagacacacactccggcccatactcaggtgcacagaaagacaagcacacagctcatccccctctccaaaactctcagttgtcattggatgacatcagcaaaaccacacacaaatacatgccgatcacaatactcctctgagatatcataagccccattttacagcagggcaaactgaggctaggagcctttaaataatatgtcactcattctggtctactcctccaactttcaacccttatatttgtctgattagctgacaataatagtattcgtgctggttcccccagcagcctccctcagggaagggtcttatttccctcgaatgcacccattcctccgcataggttctaaccatttgcccattcacctgaggaatcgagttttgatggacagattcctagaccaatagagaaactaagtgaactgtaccgatgcggccacggcttgggcgggactaaggctgggaacgagccaccgattggtcagagctacgcggcgaatggcggagacgctgaggcgggtgctaaccaggggcggtgcggcctggtccggggaggagaacatgcctgccgccggaccgcctttgctgctgctcggtacaccaggatctggaaaaacagcgctgctatttgctgcggccctagaggcggcgggggagggccaaggcccagtcctcttcctgacacgaaggcctcttcaaagcatgccccgcgggaccggaacgactctagacccaatgcgactccaggtaaccgtgggggtgggagcagaggcgttctagccaatggtggagtagatccgggatattgagtaacaggtagacaagccaatggagaggacggtggaagagcgagccagggcagccacgatggggcggagtcaggcaggcggagtgaggagtggcaccacgcggagcttagttaagattgaagtgagagcccatccaatgatgggcggtgttagcaagaggcggtgcccagagattgaagtccggcccatcaaggggcggggctaagcttgggtccattctggacctgagttggttcctgttagtgtcaaggatggggtcagaccgagaatgctgggggagggttttccgtggaaaaattgcgctagagatttggccaaaaacaaacaagcaaaaatggcttgccctcaactaatactcggcagtgatgagtgctggaaaaacgggcgaatataagaatatttaacagctctgaactggttcatcctggaaccaaggaaagtatgcaaggaggcagggttacttttaaggagtctggcttcctgtgctgaatccggccctttccttctgtttctccttctagaagatccgcttccagtacccaccctcaacccgagagcttttccggctcctgtgctctgcccatgaggccccggggccagccccctcccttctgctgctcgacggcctagaagagtacctagcggaagacccagagccccaggaagccgcctacctcattgccttacttctagacacagctgcccacttcagccaccggcttgggcctggccgggattgtgggctcatggtggccctccagacccaggaggaagcaggtagtggggacgtcctgcacctggcactgctccagcggtattttcctgcccagtgctggctgcagccagatgcaccaggtccaggagagcacggcctccgagcctgcctggagccaggcgggctgggccccagaacagagtggtgggtgactttccgatcagatggagaaatgatgatcgctccgtggcccacccaggctggtgaccccagctcaggcaagggttcaagctctggaggccagccctgagctttggtgggtgactacctctctgtgcttcagtttcccatggctggaatacttacctcagggacatatgcagatccaaagacctaaacaatgtaaagtgctttttctcttttaaaagtatagcattatcttgtatatattttacccaatcaatatgttgtttatagtttcattgctttaaactttataaaaagagcttcaggccaggcgtggtggctcacgcctgtaatcccagcactttgggaggctgaggcggtcagatcaccagaggtcaggagttggagaccagcctgcccaacatgatgaaaccctgtatcaactaaaagtacaaaaaaaattagctgggtgtggtggcaggtgcctgtagtctcagctactcaggaggcttaggcaggagaattgcttgaacccaggaagcggaggttgcagtgagccgagattgtgccactacactccagcctgggtgacaaagcgagactccatctcaaaaaaaaaaaaaaaaaaaagtttgagacttccttctttttgcactcaacgttgttactaagattcatctacatttttttagttcattcctttttccatattgcatataattccatgggtgactataccctgatttcttcatcagattgccttatttactgctgcgaacattcttgcacacatgccctggtacgtgtgtgtgtttttaggggccgagacaggtggatcacctgaggtcaggagttcgaggtcagcccggcctacatggtgaaaccccgtctctactaaaaatacaaaatttagccaggcatggtggcatgcacttgtactcccagctacttgggaggctgagacaggagaattgcttgaacccgggaggcagaggttgcagtgagctgagatcgagccactgcactccagcctgggtgatgaagacgagactctgtctcaaaaaaaaaaaaaaaaaaaatcagtcaggcttggtggtgcacgccagtagtcccagctactcgaaaagctgaggcaggaggatcgcctgagcccaggaggtcgaggctgcagcgaaccatgtttgagctactgggctccagcctgtgcaaaagtgagaccctgtctcagaaaaaaaaagaagtagttaaagcaaaactcccactgagttacttgttgacaccaagtgtcatcagagtactttcttagaacatggcctgattcagaattacttttattattattagtggcagagactagctagtggcccttaaacagctttgcccttcctgggtgtacagctaaactaagtttcctggcctttcatgtgactggggtcatgtgactgtttccagccagtgaggtgtgagaagaagagaggaagcccatttccaggccagatccctcaaatggcccattgagggtcattgctgccctttttcttcccttgctgactggcagtttgtagaacaggggatccatctaagtaccctaagagaaggtagagctacagactggaagagtctgaacctctgactcatcccatggatggctgcccatttgagctgagttaggagagagaaatcatttaatgtggtaagccagtaagatttaagagctgtttaacatactattttgttatgttatgagtagcattcagattgcagatccagcttctgaataagctcaagaactttaacttctatccctatggcctatgcccaggggaagatgggacttaaagggtgtttgtagaaatcatggtagaaaaacttacatacatatgtgtatatatatatatagatacaaaaaaaaactatacatatttaaaaatactgcaaggttgtggtttcctgagcaggatggattgggcagacaaaatcagcaatgcccctgctcctgagagaggcctcgccatccctgttccataagtcttgagtctgcactggttctctgagtcatattggatccctgatcatctgcagcctggtgtcctaagagcaagccacatagctggggggcagaggctcagcggctgggataaggctgttctcataagggttggagtaggggccatcggataagcccccttgggctccctgggagtcccctgagctgtagtcagttgagatgccagagtcagataccacaaggtacaggtactttaggtggggtggggtagggggcagctcagggcacagtgtccatggacgcaagagctgggagctggggtccaggatagtgtactcaaagctggcagcagaggctccctctgggctgggcttcgaggccaaagcagatgagcaggaggatgcttctgagccttcatccatggccactatgtccacactgccaccaggccctgggaggtcctcactgggcgggttccggggcagcaaccatttgtccagcaccagataggtatcctgggcatgctcactgcccactggctccagcagggggccctcatcatctgtccccggctccactgcctgcatcgtcccccagcagcgctctgagaggacttccagggaagcaggtgggtcctccgtgaagggggtgcaggggctccaccacaggcagccatcattctggtacagccacagctgaagaaatagcaccaacctgctcagagaggcctgcagtttggctgcaagaagcagggaagcccaggcactgaggggacaaccaggccacctacctggaagttacccttgtgggtggtgaagaggccttcaaactcgctctctgggctcgggatgccaggccagatcttctgcttcagagccctgttgaagccaatataaatagttacatagatatgactcattgaatactcaccaattccccctccactcccagtcatagaggcacagatacacttggtccctgtgatcacaatggaggcagaggagtacatcagggccaggggacaggggttttggctgaagcatcagcaaggccctacaaaagggtaaatggaacagggtattgaagggtgcataggagttcaatataccttggtcattctccctttaatcctggccatggccaggtgcagtggtttacaccagcactataatcccagtactttgggaggctgaggtgggaggatcatttgaacccaggagttcaagaccagcctaggaaacatagtgagacccccatctctaaaaaaaataaaataaaataaattaaaaaacccaaaaccctggcccagatttttccaggaggtccatgatgtcacttcatagataaatattatgttaccttctggggtaatgagagaaggcatttaggataaaatccaagccaggcacggtggctcatgcctataatcccagcactttgagaggctgatgtgagcagatcacctgaggtcaggagtttgagaccagcctggccaacatggtggaaccccgtctctactaaaactacaaaattagccgggcatgcacgcctgtaatctcagctactcaggcggttgaggcaggagaatcacttgaacctgggaggcagagattgcagtgagccaagactgctgcactgcactacagcttgggcgacaagagtgactctgtctcaaaaaaaaaaaaaattccaaactcctccccaccaccctgcagaaggccctgcgttatatgacccctgtcacctccctcatctcaatatctgccacacccccttacataccactctagccatgtggcaattttttttttttttttgagacggagtttcactcttattgcccaggctggaatgcgatggcacgatctcggctcacccgcaacctccacctcccaggttcaagtgattctcctgcctcagcctcccgagtagcggggattacaggcatgtgccaccacgcttggctagttttgtatttttagtagaggtggggtttctccatgttggtcaggctggtcgcgaactcccaacctcaggtgatctgcctgcctcggcatcccaaagtgctgggattacaggcgtgagccaccatgccaggccatgccatgtggcaattcttgaagctggctgaacgttccaatctcattcccacctcagggcctttgcacttgctgtttcttctccccacttttcaagcggctgcttccttccaatcttcaggtttccactctgatgtcacctcctcctggaggccttccctgaccatcctgtcatgtcaccacattctgtttgtttctgtgatatcactcattacaatttgtcatcaaatatttcttgggtcccttgtttgttgacttgagatccacaaggtcagggacttgtggtcagggtctagcttgttctccattctctctccagtgcctggcacatgtttggcactctgtttgtattttccaaccaagtaaatgaacagggccatgaaagacgactagaagattgcttagcagacaaggcaggaagggcattccaggcagagggaacagcatgggcaaaagcttgggggtgtgaaaccacctagtgtgtgcttggaattacaaatacctcagaacggctagtctgatcatagtgtctgagaagcttgaccgcaggggtgcggaggcattcagggtcttaaattctttcactaaatccatctagttgattttacaaaggtgatgacactggggaaaggaactaacaaagggacccaagaaatggcagcccctgatgtagaaggaaaatcaggtgaaagtccccaagagcagaaaatgttaacgaagagtctgggtctagtctggcatgcatcccagccctgccactgatgtgaatccttactgcgtgaccttgggcaagtgcgtgtctctctctgagcctaggtttccatagtgaaagaggaccgttggcggggaggagtctgggcccagcgcccaaatggggagctcaccggcggtgggagagcagcgcgagcacggtcagcagcaccaggatgaccacgaggatgagggagagcgtcaggatgagggggtccaggtctaagaggcggggaggaggtcagggcggtgggcttgccccgtgattcgccctggctcctcctacacccccgcctggggcctcaccgctaggcgtcagcagcgacacaggctccgaccaggcgctccagaagccgccgaagctcggctcagccatacgcgcgcggacggcgaaggtgtagcgcgtccggccccgcaggttgctcagcacacactcggtgcggccctccaggatctccacctgggggcggaatcagggcgagggacgcgtagcagacaaaaatagatgacgtgggggcgggccctggtggaactgagccaatcaggggaaaggaaaacggtgccctagaattgcaatgggaccaataagagtagggggaggagcccaagaaagctcagggccaatcagagagagagtctctggtacgaaagggcgggacccgggcaatttaatatctgggctagcactcgtagagggacccgggcgctaaaggggtctagggttacgggccggagggagaagaagttggggttcaacaggcttgcgaggacattaggaaagggggtgtgtctgtgggcgtggaacggtcttcagcaccagggtaatgggatgtgggatgttacggaccggccctgaaagcggcaccgggcgcgacctcgagaggcgtggctgggccgtagtcagtggagctttgggggctgggccgtaggggctggcctcaccctctgtacgctccctgcgccgttgccggccgagacgtccacctcgtagcggatgtgagacgtcatgggtgtctcaggcggcgggagccagcgcaacactacgtggccgctctcgtcagccaaccgcgccaccagccccacgggggcgtctaggagcactgcaggcatgggggttggtcaggtgggcgaggactgagaccctctcctccgaccactcctccattcccagagcacttacctacttcattgatgtggatgacacggtgatatcgcggagcgccggaggctgctgtgacgcgcaactctaggggcacgaagctcgacgtgtcggctgtaggcagcgaacaccagaagcgcaccgcaccacgagccgtgggagcctggtgcaggcgacacagcttccatggctcatccctatgcgcccagggaagggagcaggttgggaggggggaccggggagttggcattgcccggcctgtggggggcagtgtgtatgtgtgacacaaggtctagccttgtgtgtgtgtgtgacaaggtgttccttcgtcgcccaggctggagtgcagtggcgcgatcatggctcactgcagcctcaaattctggggcttaagggatcctcccacctcagcttcccaagtagttgagaccacaggcacgcgccacgcctggctttttttttttttttttttgagacggagtttcgctcttgttgcccaggctggagtgcaatggcgctacctcggctcaccgcaacctccgcctcccgggttcaagcgattctcctgcctcagcctcccgagtagctgggatcacaggcatgcgccaccacgcccggctaattttgtatttttagtagagatagagtttctccatgttggccaggctggtctcaaactcccgacctcaggtgatccgcccgcctcagcctcccaaagtgctgggattacaggcgtgagccaccgcgcccagtctaatttttttttaagagacggggatctcgctgtgttgcccaggctggtcttgaactcctgggctcaagcggttcttccgcctcgaccttccaaagagttgggattacaggcatgagccactgctggcctccttttggatactacctcgagaaggcgtcccagccccgacgtagtaacgccttaccctcgatttggaggcgttgttatcccagcctgatgtttggggtcgcgttccagcggtgatcgcgggagtgttcgcgccccggcccatagagggcgtgccagccctggacccgcaggtttccctccagtgaccacgactggaggcgccgtcgggcctcaaacagcaggggacatacgaggctacgacctccagggagctctgccccaccccctccctccgcccttggaggcacccgccggatcggactcactcgagctggtaggagaagctgtagttgcccgggcccaccccagcgctcgccgcttcctcccagaaacacaccaagtcctccaaccgctcggtgaagcacagaagctcttcgggcccccgggccgccagcaaggccgctggggaggggcgacaaaggaagggcatgggggtctgagctctatcctcgggagacagccccctcctcttccctcccgcagcctgggcggacccgataagaaaaaagccccgccctgccatcttcccaagcgggtcccttggaggggtccgcagaggtggtgcccccctaattcccaggggcaagtttctcgccttactgtcccccgccgtcaccactggcgcacacctgcccacccagcggccagctgagctgggcgcggcgttcaagacctcgagctcgggactgccagccccgccccagcctaggacacgcgcgcggctgggggtgtgtgcggagaggcgggccccctatcggccccggcaggctccccgccaaccgatagcgccaaccgtgccccccgcctccctccctccaccgggccgggcaagtgatctggcgccctcacacaaaccgtgtttacagtagcctgtggcttggcccctctaactcggacccgggctttaccctccctcccctagggagggtcggcttggtccccaccccccagggaccttagcaccaagtcagcccccttaggatttagcatgtcccagactccctgaaaaggtaaaacgggaatgttaagcccactctagctcttgcccgggacgcgatcaggagtcttggatcctaacataccccaccccgccccccacccatccaggacccagtctaagggttcagatgccagcttggcccccaggacccggtcaggaagtccagaaacaggcatggcccccaggacctaggctgggagttcaggccccagcatggtcctgcaggctccagcgtaggggtccacacgcagctcatccttacctttgctctcgaacttggggtccgggaggttaggcgggggcgcccaggcggccccagcgagcaggagacaaagggagccgacctggggccagagggacgccccgaggtggtccatgatacagcccccgccacggggagcccagggctcctgcccctccgtcccccgcccccggcacagtccacagctgggtcagcagctgcctccgccggacgcagctgaccaggcccttcccgaccaggcgcctctaagtggcagatccccgagggggcggggccagcactcagcctgggtagagataagtgcctggcgggaggaggcaggggcccttcccgagcccagaggccgcttgggggcaggggagggagttgggccgcaacagctcccgttctggcttcagacacacgttttttttttctttgtggccctggacaggtgacttaccttacctgagcttcagacttctcatctgtaaaatctagcctggcacatagcgaacattccaaaaaatgtacctactgattttatcgcagaaatcagcatctcttcccagcctggaaataaataaaaattattttctctctctctctctctctctctctctctctctctcctttccttccttccttccttccttccttccttccttccttccttccttccttccctccttccctccttccccctctctctctctgtctcagggtgttgctctgtcacccaggctggagtgcagtggcacaatcatagctcactgcagcctctggactgaagcaatcttcccactgcacctggctaatttttaaaattctttgtagagatgggatcccactatgttgtccaggctggtcttgaaatcccggacttaagcaatcctccagcctccatctcccaatgtgctgggaataccagcacgagccactgaagccggccaataataatccttgcaacgaccagcagttgagtgtttgcacagtgctaggccatgctcctgggcagtatgcataatatgtgagattttcatttacgaatttttgggaaaaaaatttttaccacccacatttttattctcttgggctgggcccggtggctcacgcctataatcccagcactttgggaggccgacgtgggcaaatcacttgaggtcaggagtttgagaccagcctggccaacatggtgaaatcccatctctactaaaaatacaaaaattagccaggtgtggtggcgtgtgcctgtaatcccagctactcaggaggctgaggcatgagaactgcttcagtctgggagatgaagattgcagtgagccaagatcatgccactgcaactccagcctgggcaacagagtgagactgcatctcaaaaaataataataattggctgggcgcggtggctcatacctgtaatcccaacactttgggaggccgagacaggcggatcatgaggtcaggagttcgagaccagcctgggcaacatggcgaaaccacgtctctactaaaaatacaaaaattagccaggcgtaggccgggcgcggtggctcacgcctgtaatcccagcactttgggaggccgaggtgggcagatcacgaggtcaagagatcaagaccatcctggccaacatggtaaaaccccatctctaccaaaaatacaaaaattagatgggcgtggtgctgcatgcctgtaatcccagctacttgggaggctgcaggagaatcgcttgaacccaggagccggaggtttcagtgagccgatattgtgccactgcactccagcctggtgacagagcgggactccgtctcaaaaaatatatatatatattcgagcgtggtggtgggtgcctgtaatcccagctactcaggaggctgaggcaggagaattgcttgaaaccagaaggcagaggttgcagtgagctgagatcacaccattgcactccaggctgtgcaacaagattgaaactctgtttcaaaaaaataaataaatagtccatgcacagtggctcatgcctgtaatcccagcactttgggaggccgaggtgggtggatcacaaggtcaggagatcgagaccatcctggctaacacagtgaaaccctgtctttactaaaaatagaaaaaattagccgggcgtggtggcgggtgcctgtagtcccagctactcgggaggctgaggcaggagaatggtgtgaacccagtgggtggagcttgcagtgagccaagattgtgccactgcactccagcctgggcaacagagcgagactccgtctcaaaaaaataaataaataaaataaataaataaatataaataaatataaataaaataaaatggcaatactcctaccctgtttctattaagcaggtgggttttttgtttttgtttgtagccaatgtgcttattgtcacctgacatgtatttgatgttttgttattgattcgctgcccttactattccatgaaagcaggtttttttttttttttttagatggtgtcttgctctgttgcccatgttggagtgcaatggcacaatcttggctcactgcagccttcgcctcctggattcaagcgattctccttcctcagactccagggtagttgggactacaggtgtgtgccaccacacccagctaatttttgtagttttagttgaaacggggttttgctgtgttggccaggcttgtcttgagctcctgacctcaagtgatccccccgcctcagcctcccaaagtgctgggattactggcatgagtcactgagcccggccagggattgattgattgattgattgattgatttgtggagtcttgctcttgttgcccaggctgcagtacaatggcatgatcttggtttactgcaacctccgcctcctgggttcaagtgattctcctgcctctgcctcccgggtagctgggattacaggcacccgccaccatgcccggctatttttttgtatttttagtagagacggggtttcgccatgttggccaggctggtctcgaactcctgactttgtgacccgcccgccttggcctcccaaagtgctgggattacaggcatgagccaccgcgcccagcctcaggcagggatttttttttacccttttgttctttgctgtatccctagcatatagaacagggcctggagcacagtagaagctcaagaaatattttgtggagtaaaagattagagatgtagagaaaatcaagctgagagaggtagagaaacagctgatctcgtgttagccactgggtacaactgtgcctgcgtaaccctgcgcttttaaaaaacggaagtcaacgcaaatctcttcctcaggaaattgatatttagactgtgcatgtatgtgagagggaggtggaacaaacaagatggacacctgtttcaaaatttggtcacaataaattgttatgaatggcaaacgggccccagagttaaatgcatgttttctggagttggatcaatatttgaacagcacccacttaccatgggaccttgagtaagttacttaaccctcccttgcctgaagcctggctgacatggtgagaccttgtctctataaaacacgttttttttttgttgttgttttttgttttttgtttttttaagtaagccagatgaggtggcacccgtctgtggtcctagctactcgggaggctgaggtgggaggatcacttaagcccagaaggtggaggctgcagtgaaccatgttcatgccgctgcattccagcctgggtgacagagtgagatcccgtctctacaaaacattgtttgtttgtttgagagacggagtctttttctgtcgcctaagctggagtgcaatggcgccatctcggctcactgcaacctctgtttcccgggttcaagcgattcttctgcctcagcttcccgagtagctgggactacagatgtgtgccaccatgcccagctaatttttgtattttttttagtagagacggggtttcgctatatgttggccaggctggtctcgaactcctgacctcaggtgatgcgcctgccttggcctcccaaagtgttggagtgttgggattacaggtgtgagccaccacgcccagccaactttttttttttttttttttgagacggagtctcgctcagctgcccaggctagagtgcagtggtatgacctcagctcactggaaccaccgtctcccaggttcaagtgattctcccatctcagcatcctgagtagctgggattataggcacccgccatggctaatttttgtattttagtagagatagggtttcaccatgttggccaggctggtcttgaacttctgacctcaggtgatccacccgcctcagcctcccaaagtgccaggattacaggcgtgagccatcgcacccggccaactttgtttttaagttagccaggcgaggtggcatgcgtctgtggtctcagctactcagggggctgaagtgggacgattaattgagcccaggaggtggaggctacagtgaaccatgttcacaccacggcactccagcctgggtgacagagtgagaccccatctcaaaaaaaaaaaaaatagtggacgataagtgtctcttccggcccagacatggtggctcttgcctgtaattccagcactttggaaggccgaggcaggggaatcaattgaagatagtagtctgagaccagcctgggcaacataacaagaccctgactctacaaaaaagaagaaaaattagcctggtgtggtggtatgtgccggtagtcccagctactcaggaggttgagtaggatcacctgagtctaggagttcgaggctgccacgagctatgatcgcaccactgcactccagtctggttacagagcaagacactgtctctaaaaataaataaataagtaaataaataaataaaatgtataaagtgaaaataatgtctactccatagagctatggtaaggattaaattagattgtgtcaagttctttttctttttctttttttttgagatggagtttcgctcttgtcacccaggctggagtgcaatggcacaatctcggctcactgcaacctccgcctcccaggttcaagtgattctcctgcctcagcctcccgaatagctgggattacaggcatgtaccaccacactccgctaattttgtatttttagtagagacgggtttctccatgttgaggctggtctcgaactcctgacctcaggtgatccgcccgcctcggcctcccaaagtgttgggattacaggcgtgagccaccgcgcctggcccctgtgtcaagttcttaaaacagtatcttgacatacaataagcattcagtaagtatagcaatttgcttaaactagttcaagaaggatgctgaactaacatccaaatgatcttaagaggctggatgcggtggctcatgcctgtaatcccaacactttgggatttgggagacagaggaaaaaaatacccatttgggcaaaaaatatccaaattgtcttaaggtctttcttttctttttcttttcttttctttttttttttttttttgagacaaagtctttctttgtcacccaggctggcgtacagtggtgcaatctcggctcactgcaacctccgactcccgggttcaagcgattctgtcctgcctcagtctcctgagtagctgggattacaggcgtgcaccaccacgcctggctaatttttgtatttttagtagggatggggtttcaccatgttggtcaggctggtctcgaactcctgacctcatgatccacctgactcggcctcccaaagtgctggattacaggcataagccactgtgcctggctggtcttaaggtcttaatactcacagaagaccaaaatttaaaaaaagcctgtaaaggagcggcaaggcacagtggctcacacctgtaatcccagcattttgggaggccaaggcaggtggatcatcaggccaggagttcgagaccagcctgaccaaaatggtgaaaccccgtctctactaaaaatacaaaaattagccaggcgtggtgacacacgcctgttatcctacctactcaagaggctgagacaggagaatcgcttgaactggggaggcggaagttgcagtaagccaagttctcgccattgcactccagcctgggcgacaaagcaagactctgtctcaaaaaaaaaaaaaaaaaaaagcatgttgtgtgctagtaattggtctttcatcagaccttatatgatacttaaatttctgtatctctactcccaacccacataattcctgggcattcctcattattgctccagggataatgtttgaaaacctagtgattattttttgcccattcaccagaactcccccttctcctcataacagcccccacatttaatgtccacttatggactctcccaggctccacccctgtgattcaaagtttctgtgccagctcaaagggtgggcgcaggacccaggcctggctaatcagcacatctcattcccctgaacacagtgattggtttagaggtggacacatgacacaaattggcccaatgggcgcctgctctgggactttttgctggagctgatgggaaggaggggctctgcttgcatgggatgggggagctgttgggatataagcctatgcctccacaaggtatgagcctgccttggagtagagctatatatatatatatgtgtgtgtatttttttttttttttttttttttgtagagacggagtcttgctctgtctcccaggctggagtgcagtggagcgatctcggctcactgcaacctccgccttccaggttcaagcaattctctcgcctcagcctcccaagtagctgggattacaggtgcatgccaccacacccagctatgagtacagctatattaaataaaatattatttgggctactgtaacagcaactcaaataatagtggcttaagtaagataaaaatttatttctcttttatgtaacactccaagtatcaacagtccaatatggtagctccctggtctcataggcccaggctccttctagcttgttgctcagctattcagacagtgtgaaccacctaatccaaaatgatccactccacgtcttcattcccaccagcaggagggaggaaagggggaaaagaaggacacaccgcttccctttaagggcaggttctgaaatttgttcacatcctttccctttatatcttattggccaagacttagccagtggccagatatgaccacaccttgctgcagaggaggtgggaaatatggcttttactttgggaggccagctaaaaatcagtggttccattaccatagaagaaggtgattaaatttgaggggacaatggactatctcattctcagagcaaatcagagcaaagagacagcaagaaaaccctgatgacatcttatgagtgcctggatgcaactgtgcctgaagccctactcattggacatttcaactgcataagccacaaatgtccttttttgcacatgcctctttgaattgggtttttggtcgcttgcaacagaaagaactcgattagtgcaatgagatgtaaagaccatagctgatgttctctgctgagtaggagctcataagtgggcatattattgtggttgtgactatgtagcagttcgccctacagctcatttcatcctctctattgtactccaacgctgacagagagctcacgcctctcttttcatcctcacaatccttttctttttcttttttttttttttccagacagaattttgctcttgttgcccaggccggagtgcagtggagcgatctcgactcactgcaacctctgcctgcctggttcaggtgattatcctgcctcagcctaccgagtagctgggattacaagagcctgccaccatgcccggctaattttttgtatatttagtagagaaggggtttcaccatgttggccaggctggttttggaatcctggcctcaagcaatccacccgtcttgcccccccaaagtgctagagccactgtgcccagcatttttttttttttttttgagatacagtctcactttgtcacgcaggctggagtgcaatggcatgatctcggttcactgcaacctccaccttctggattcaagcaattctcctgcctcagcctcctgagtaactgggattacaggcacccaccaccatgcccagctaatttttatattttttagtagggacagggttttaccatgttggccaggctgaccttgaactcctgacctcaagtgatccgcccacctcagcctcccaaaatgatgggattacaggtgtgagcactgcgcctggcccttttttttgctttttgaaacaggatctcgctctgtcacccaggctggagtgcagtaatctcggctcactgcaacctccacctcttgggctcaagtgatcctcgtgcttcagcctccagagtagctgagactacaggtgcaggacaccaaacctggctaaattttattttattttttgagatggagtctccctctgtcgcccagactggagtgcagtggtgcgatctcggctcgctgcaagctccgcctcctgggttcacgccattctcctgcctcagcctcccgagtagctgggactacaggcgcccgccaccacgcccggctaatttttttgcatttttagtagagacggggtttcacctagccaggatggtctcgatctcctgacctcatgatccgcctgcctcagcctcccaagtgctgggattacaggcgtgagccaccgcgcctggccaatctttgtatttttttgtagaaatggggtctcactatgttgcccaggctggtctcaaactcctgggctcaaaatccttccaccttagcctcccaaagtgctgggattacagatgtgagccaccacacccaacctctttttctcttctttgcacagatgggttatctgtgacaggaagaggaagaaggtgagggcaagtgaaagggcccatcctcacagcccttattgactcatgggtaatgatgctatttgtttctaattctgatggaatttcagttagtcactctcccatatatacagtagaaaagaggcatatcaccccaaaaatgttggggaaggaagtcctaaaccctctttgtgtgataggatcctttatttatttatttagtgagatgtgatctcactgtattgcccaggctgctctcggactcctgaacttaagcaatcctcttacctcagcctcccaaagtactgggattaccctcctgagccactgtgtccggccagacaggatcctctctggcatctgggttgagtgtcatacccgactcaacacctttcttagggctcttagtttttttgtttttgagacaggatctccctctgtcctccaggttggagtgcaggggcccagtcactgctcactgcagcttcaacctcccagggctctggtgattctcccagctcagcctcccaagtaggtaggattacagtctcatatcaccacactcagaaaattttttgtttgttcatttgtttgtttgtttgtttttgagatagggtcttgctctgtcacccaggctggagtacagtggtgtgatttccactcactgcaacctccaccttccgggttcaagcaattctcctgcctcagcctccccagtagctgggattacaggtgcatgacaccacgcccggctaattttttgtacttttagaagatggggttttgccatgtcggccaggctggtctcgaactcctgacctcaggcgatctgcctgccttggcctcccaaaacgctgggattacaggcgtgagtcaccacgcccagccaaatttttgtattttttgtagagacaggatctcgttatgttgcccgggctggtcttggctcttaggtttctctctctctgtgtgtttgtgtgtgtgtgtgtgggtgtgtgtgtggtagctgttttcctttatcttgataaagggtgaacatggcacacaggcgcaaaataaacaagactgacacctgtttcataactctggtcactattttcatccgcatctgtcacttctgatgcgtctctaacatttataagatttctctggggagggatttgacgtatccatgccccacctctttctacatttatgggattgagctctccaccagccacccatgggctgatgtctttggaatatggatctagtaccaacagagtcagaaaaagagatggggtccaatgggctacagttgggtggtggtcctgggatacacagcacagtggcctctactgggggatggcagctttccaggagaagagtcgcaagcttgcctgtgggacttgtgtcttgtggagaggacagggctgcctcagcttggggagacagacagagtgttccgggtcccctctttccgccgcagcatgaagtctctgggggcgactggactcatggcatagaagacgttggcattgtcaggaatcaggagcactggtcaggagtggagatggtggtaataggccctcacaaccttgtgtcacccccacagaggacccgggagcctcctgccactcacccgcgaacctgaacagccatgggtccctctgcagctactgccaagccaagctcattctgctgtcactgggaacctggacgacttctcacttgaaaacttgcaccacctcatgccttcccttatcataagcctgggcaacctcctaatattctccccctcaccatagagacaaggcaacctgcagtaaaagtttgagcaaactggccgggcgcgatgcctcgtgcctgtaatcccagcgctttgggaggccgaagtgggtggatcacttgaggtcaggaattcgagaccagtctggccaacatggtgaaaccccgtctctactaaaaataccaaaaaaatgagctaggcatggtggcacatgcctgtaatcccagctactcggaaggctgaggcaggagaatctcttgaacccaggaggtggatgttgcggtgagccgagatcctgccattgcactccagcctgggcaacagcacgagactccatctcaaaaaaaaaaaaacaaaaacaaacaaaaccgacaacctgcagtaaaagtttgggcaaacttagaccaccctagaccaccccccgccaaacaacttcctgctcaccctacccctcccccacaaccactcccagccaatcccatgctgctgtcaccatgaacttgaataacttcccacttccagcctgcacgagcttgtggcctcacactcaacacctgaacaaccacaagcatcctttcctaatatccagccaacctcatgccatgtacttcagcgtgaatacgctcaatcccttgcttctccctgtcagacaggacaatctcatgcttccgcggctatccatttgcctctctcccgtcccaagttcagataacttcagggtcccagtggtgaacaaacttagttctcacaaatctaagcccagatgccctttagtctcccatcccatcaggttgagcctgaacaatctcatgatgctacaaacttaagatcagacaaacttctacactcccttctctcactcgaccctagacaatctattttttctttttttttgagacggagtctcactctgtcgccaggctggagtgcagtggcgcaatcttggctcactgcaaccttcacctcctgggttcaagtgattcttctgcctcagcctcctgagtagctgggactataggcgcctgccaccatgcctggctaattttttgtatttttagtagagacgaggcttcaccatgttggccaggatggtctcgatctcttgacttcgtgatccacccgcctcggcctcccaaagtgctgggattacaggcgtgagccaccatgcccggcccccttttttttttttaattgagacagggtcttgctctgtcacccaggctggagtgcagtggcgtgatctcagctcgctgcagcctccacctcctaggctcaagtgatcctcccacctcagcctccccagtagttggagttgggaatacaggcacatgccaccatgctcagctaatctctctctctctctctctctctctctctctctctctatatatatatatatatatatattttttttttttttttttttttttttttgagacagagtcttgctcagtcgccaggctggagtgcagtggtgcgatctcggctcactgcaacctccgcctcctgggttcaagcgattcttctgcctcagcctcccgagtagctgagactacaggcatgtgccaccatgcccagctaatttttttgtatttttagtagagacggggcttcaccatgttggccaggctggtctcgaactcctgacctcaagtgatccacccgctttggcctcccaaagtgccgggattacaggcgttgagccaccgcacccagccaatttctctattttttgtatagatggggtctcctcatgttgcccaggctggtctcaaactcctgagctcagacaatccacccaccttgacctcccaaagtgctgggattacagttgtgagccaccatgcccagcccatcctacaaattgaaggtcagaaacactcccttctgtcacttgtccgtggacagtctttttttttttttttttttttaaacagagtctcgctctgctgcccaggctgaagtgcagtggtatgatctcggctcactgcaacctccgcctcccagattcaagcaattattctcctgcctcagcctcctgagtagctgggactacaggagtgtgccaccacacccgactaatttttgtatgtttcgtagagacggggtttcaccacgttggtcagcctggtctcaaactcctgacctcaagtgatccgcccagcttgacctcccaaagtgctgggattacagacatgagccactgcgcctggccggaccctggacaatcttattgtcttttaaattttaggaagatgacctttggtacctctctctcacactgagccaagacaatctcatgaccctacatcgttgggttacaggtattttatgtcctcttacctccactgattatcttacccctactctctgcctgaagcacctcacagccctgtgaacccgggtaaccttgggctccatccttgggcgtggtcagtctgctcgcctccccgctgccccctatcctgagctccaacccatccctgctcaccccggtccccaggaaggacttgaaagagctgatagtcacaggcccagggctggggcacattgtgcttctgcaaggctcgccggaccacgctgggggctttgtcctgactggtcagctggaagagaggggcgggaggtgaggtgagggccccggccccaagggcagggcagcctccagcagacccccagcccagcccctcaccaagatgcttcgatacaggttcccgtggtcattgtcgatgctgacgcggatgacacgggcctccgagctctgctgcgccgggagggggattcgagggctgcccagaggcaaagcgaagggccgggggctgggcaggtccaggctcaggggcagctgcaggcagtaaggggtggaggctacagcttggcccatctgcagatgctgagggctagaaaagcacgaacaccccagccaccactggtgcattcaatagccccacatttaaaatctcaagaaaacattggctgggcgcagtggctcatgcctgtaatctcagcattttgggaggccgaggtgggcggatcacttgaggtcgggagttcaagaccagcctggccaacgtggtgaaactccgtctctactaaaaatacaaaaattagcagggcctggtggcgcatgcctgtaatcccagctacttgggaggccgaggcaggagaatcacttgaacttgagaggcagaggttgcagtgagccaagatcacgctactgcactccagcctgcgtgacagagcaagactccatctcaaaaataaataaataaataataaaataaaataaaatctcaagaaaacatactactaccccctacacatgcagagcctgggacatgcaactggagtacattcacaagcctgcatatacaccaccctaccatatacagactttggttacctgttatagaaacagacatgaacagtgtccatatacacacaacccatgctcatacacaagaaatcctgtgtacatacatatgctgacagcggttatacacccacagcccatgccaatgaacaaccccacacatgatctcatgaatactcaggcccacatttcctcttctggtacacagattcttttctttttcttttcttttttttttgagacagagtcttgctctgtcacccaggctggaatgcagtggtgccatctcagctcactgcaacctctgcctcccaggttcaagcaattctcatgcctcaccctcccaagtagctgggattacaggcctgtgccactatgcccagctaatgtttttatttttagtagagacggggtttcaccatgttggctaggctggtctcaaattcctggcctcaagtgatccactggcctcggcctcccaaagtgctgggattacaggcatgagctaccatgcccagccttcatttccttcatttccttttctttttttgtttttcttttagagggagcctcgctctgtcaccaggctggatggagtgcagtggcaccatctcagctcactgcaacctccgtctcctgggttcaagtgattctcctgcctcagcctcccaagtagctgggactacaggtgtgcgcgaccatacccagctaatttttctattttcagtagagacagggtttcaccacgttggccaggatggtctcgatctcttgacctcgtgatccgcccacctcggcctcccagagtgctgggattacaggcgtgagccaccgtgcccagtctctttttcttcataaacaggatctcgctctatcatgcaggctagagtgccgtggcatgatcgtagctcactgcagcctcaaactcaagcgatccttccacctcagcctgctgagtagctgggactacacccagctaatttttttgacttttaatagaaatagggtctcactatgttgcccaggctggtcttgaactcccggcctcaagcaatcctcccactttggcttcccaaagtgccgggatcacaggcaatagccaccgtgtctgccatggtatgcagattcttagggacatacatgtcctcaaaaaagtgtaggctgggtgcggtggctcacacctgtaatcccagcactttgggaggccgaggtgagtgcattgtttgagctcaggagttcgaaacccacctgggcaacatggcgaaacctcatctctactaaataaaaaaaatagcagggcatggtggtgcacacctgtggtcctagctacttgggaggctgaggtggaaggattgcttgagcctgggggaggggtggaagttgcggtgagctgagattgcaccgctgcacttcagcctgggtgacagagcaagaagaccctgtttcaaataaaaaggggtgtgatgtgattgcaccctagatgacccatgggcaagcagttacacaggtccaaatctgagcacgagtcggatttatgagtgatcacccaaacagggccgtgcagatgcatgcaatcccctggatggataccccgggcgctcagtgtgcctcctgtatacactcctggccccacaatcctgtgtgtacacatgtgcatgcacacacacgtgcacacacacagagcctgggtgcccgcaggcccgcatgcacacacaagccgtcttggtaccttggtgctggggccctggggccctggagaggccgggggactgccagcaggagcatctctgcttctaggacttgaggggggtgaccctggggacacactgggggagatgcagaggctgaggtggggtggctgtgctgactcctgatcccatgatccccagtcccatcaccaagcagaatgctcacctggaggtgggggatgaggggtccccgggactcccactaggtgatgagcttttctctcgggcaagcttcctaaggatggggacaggggatgaggctaaggcaggagcagcccttgctgatatctgcccacatcaccgcccctacacacaccccgagactcacgcactgagacgcttggtgaggctgatccgccgtcggatgcgtggggagctggggcaggaggcagctggtggctcaatgacccgggagagccggtagctgaggggtcaatatgtggatgaggtggtgggggcaggaaatacaggggatggagagataagagttggaatcagttgggaggtgggtttggggtgtaagggggagcagccagaggtggcaccccacatgccagggtcagggtggtaaatgagggtcattgagcatcaaggtcttatcagagatgggacaggatggctggtcaggaggtcacaaagagattcacagggtggcactaaggaatcaaattgggtcaggattaaagtcagggtcaggactgggtgcagtggctcacgcctgtaatcctagcactttgggaggctgaggcgagaggattgcttcgggtcaagagttcgaaaccagcctggccaatatagtgaaaccccgtctctactaaaaatacaaaaaaaattagccaggtgtggtagctcgcgcctgtaattgcggctaccggggaggctgaggcagtagaattgcttgaacctgggaggcgggggctacagtgagccgagatcactccactgcactccagcctgggaaacagagccagactctgtctcaaaaataaataaataaataaataaataaataaataaataaataaataaaataaagtcagggtcagactggggtcaggtcaccattggggtcaatggttagggtcacagttatatagaaagaaaggacacagttgtcatagtcaagctggacagtcaaacataaaagttggagtcagttactcagaactgagggtcaagggttggggtcagagagtcagatgaggggtcatgaataaggtcatgggtcagataggaccaaagatggggaagtcaacagatgggacagttgagttgaatggccagctgaatgctaaagttgaggtcagaaaatcagatggggttgaaattgaggtcagaggtcaattgtgactatttttttttttttttttttgagacagggtctcactctgtcacctagactggaactgcagtggcgtgattttggctcactccaacctctgcctcccaggctccagcaatcctcccacctcagcctcccaagtagttgggaccaacggcactcaacaccacattcagctaattttttttttttttttttgagacggagtctcgctctgttgcccaggctggagtgcagtggcaccatctcggctccctgcaagctctgcctcccgggttcacgccattctcctgcctcagcctcccaagtagctgggactacaggcgcctgccactacacctggctaattttttttttgtatttttagtagagacggggtttcactctgttagccaggctggtctcaaactccttacctcatgtgattcacccgcctcggcctcccaaagtgctgggattacaggtgtgagccaccgtgcccagccacgttcagctaatttttgtatttttttgtagatatggggtttcgccatgttgcccaggctggtctcgaaatcctgggctcaagtgatccacccaccttggcctcccaagtgctgggattacacgagtaaaccaccaggcccagtctatttgattcgactggagatactgcaaggtcacaggttgtagtgggggatcagggctcaagagggggtcttgggaggagctggaggtgtgtatggagtgggtggaatccagttggtgacccaggctcagctggggtggggctgggacaggctacagggtggtcacctctgctcctcggtgagctggttctgggcatgcagggcagccaggatgggcgggtgggggctcagggtgtagctctgacagcgcctctgcagctgctggatgcgggccaggatctcccactcctggaggacgagcctctaagaccctacccctgccccacccccaccctcaggcaccaccacacccactgtagcctccactcaccttcctcctcttctcaaagttaatgagatccccctgggggcaaagtgtgtctgaattgcagcacccagggtcaagggtcaagggtcaaggtcaggggctgggatgtcaggagccccactgtagtaagggagtgtggggtggtgtcaggagtacaggtaggatcaagggtggatattgggaggcccattgtgctgggggcaagtggagctggggtcaggggtcaagggtcaggggtcagacctccaacatatccggcagggctgtgtccagcataaccaggtccgtaaggaaggtgccaaggtaggggacagggcctgggggtggtttctgcagcccccaaagctccagtcacttggggccattactgaccccatcaccatccacaaccctccctgaaggtcccacttgtccccatcccaaactgtaatcactcactgagggcaggctgcctggggtgttgtcctcttcttgggatccctcagtggcctcctcctgagggaagagaaaaactgagccaggtctggggtctccttggacaattcctcaggaacgatgcctgcagacccatcatatatacccttcatgctttgagtaatcaaaagtcagtggtaggccaggtgcgatggctcacgcctgtaatcccagcactttgggaggccaaggcgagcagatcatgtgaggtcaggagttccagaccaccctggccaatatggtgaaaccctgtctctactaaaaatacaaaaattagccgggtatggtggctcacacctgtagtcccagctacttgggaggctgaggcagaaggatagcttgaacctgagaagcagaggctgcactctagagggagtgtcgctctgtcacccaggctggagtgcagtggcgcgatctcggctcactgcaggctccgccccccggggttcacgccattctcctgcctcagcctctcaagtagctgggactacaggcgccccccacctcgcccagctaattttttgtatttttagtagagacagggtttcactgtgttagccaggatggtctcgatctcctgacctcgtgatccgcctgcctgggcctcccaaagtgctgggattacaggcgtgagccaccgtgcccggccaaaaaaattttttttaagaaagggctggacatggtggctcacgcctgtaatcccagcactttgggaggccgaggctggtggatcacatgaggtaaggagtttgagaccagcctggctaacagagtgaaactctgtttctactaagaatataaaaaactagctgggcatggtagcatatttctgtaatcccagctactcgggaggctgaggcagaagaatcgcttgaacccgggaggcggaggttggagtgagccaagatcgcaccattgcactccagcttgggcaacaagaccaaaactccatctcaaaaaaaaaaaaaaaaaaaaaaagaagccaggggttaaggcccactctagaagccagaccaccttggatgagggtagggaggagataaacagcagggagcaggccccatgagaggtggggcttgtgggtagtggcccccagggctggccttaacaaggagagaatccttgtccgcagctggatggcacaggcctgccagggatctcctgggtatcctgaatttgctgttgtttacttactttttatttcattttattttgagatggagtctcactttgtcactcaggctggagtgcagtggcctgatcttggctcactgaaggcttgaccgcccaagttcaagcgatcctccctcctcagcctcctgaatagctgggactacagacgtgcaccacaaacgcccagctaattgttgtattttttgcagagatggggttttgccatgttgcccaggttggtcttgaactcctgggctcaagtgatcctctcaccttggcctcccaaagtgttgggattataggcgtgagtcactgagcccagctcacgtgctgttctaggtgctgggcaggaaaacagggtttcactctgttagccaggtgaaatttggctgggagtgatggctcacgcctgtaatcccagcactttgggaagccaaggcaggtggatcacctcaggtcagggattcgagaccagcctggccaacacggcaaaaccccgtctctaccaaatacaaaaattagccaagcgtcgtggtgggtgcctgtaatcccagctacatgggaggctgaggcagagagaattgcttgatcctgggaggtggaggttgcagtgagccaagatcgtgccactgcactccagtctgggtgacagagcgagactctgtctcaatacaaacaaacaaagaaacaaaaaaacaaatgatgacgacaacaacaacaacaacaaaaaaccagatgtgtggttttggggatgatggaggctgggaaggcctctcagaggcagggacatttaatcagagaccagaaggaggtgagtgagcaagttgcatgcaaacctggaggggtggagaatgttccaggcccagggatccattctagattcactctaaaaaccagcgcctgattgcaatgagaatctaaatcttgcctataaataagccagacttttgacacacattttttagttttgcttatcaaggtaaagtcctcagaacattttttttgttcccaccctgtgctatgactctggccttaagtaaccttttctttgtgacttcttgtgttttgctgagtgaataaatagggcagtcactgacagtcaactataacgcaggaagtagaggaaagaaaaacgtgcaacccgccagggacaaggataaggtcattgctgagcggtagggaaggacagagtgtcctgactatagcagggagattacccctgcctggccccaagtccctcccccgacttcccgggcctaaaatccctggagtctgcatccatctctacctggaaaagaatctctctgctgctgaggtggttgttctcatcggagaaaatctgcgaaagtttcctgaaagtagatagcggttccctggaaggacaggagaagggtggtcaggggtcagtggcttgggagggtcagacctgggatgggctggggaacaggtcccgccccagctcaccggctcactgccccccagctgcgcttgagccggtagatggggttagattgcagggcggacaggatggcgcgcaaggaggagaagttccgcagttctcggcagcgctgccaggcggtggggacgcaggtcagacccaggcattatccacctttcatcctgaaacttcttcatctttttttttttttttttttttttttttttttttttttttttttttgagagatagggtctgtggcccaggctggagtgcagtggctcgatcatagctcacttgctgcctggaattcctgggcttaagcgatccacatgcctcagcctcctgcctcagtagctgggactacaggcgcgcgccatcatgcatggcttattattattattattattaattatttggacagagtctcgctttatcccccaggctggaatgcagtggcccgatctcgagtcactgcaacctccgcctcccgggttcaagtgattatcctgcctcagcctcccaagtagctgggattacaggggcacaccaccacacccggctaatttttttgtaagtctcatttttaatttttttaattttttttttttttctagaaacattggtctcactatgttgcctaggctggtctcaaactcaagggctcaagcgatcctccctctccccaaagtgctgggattacaggcgtgagtcactgcgcccagcctgatcccgtgacttgtgacgccaggtcggacccctgggtgttgtctcacatccgacaagctaccaagactcccacttattccctaggattcccttcctccctcctccctcgggctccagcccctccccagctgcccctccagcccctgcctccgaccttgacttctccggtccgggctccctacttctcccagctcccttgggacctagtcgtgcccgcggcctctctgcaggacccagaccctcctccctgaacccaagtctcaccctaggtatcaactttccaccccgttccctccctcgcctagactcgcccctatctctctccggagccctcattttttccccttgccccagggcccgcccccgcatcccctctccgcgcccgcaacacacctgggcgatgcggatccacttctccagccgctgcgccctctgcggggcggccaagcccggtgctccgagcacggaacccagcacacagccggtcacggtgttgaactgggccacggtggcgcgcacagtgggggaggcgcctgcagcccccggccggtccctctgcgaccacacggagcccaagcactcgtagagcctcaccttggagaagagctcctgggccaggggaggggtgtgggattggtgcttagcagaacctgtcccctcactgtggctcatcccgaccctgtccgggatcctcaccaagtctatgagggtcagctgctcggccacctcgtccacgctgaagtccaggagctggggaccttgaggcatgagcccttcctcttcctccgcgcaggcctctgaagagtctgggtcagaagtttgggcaactctgggaggtcctgatcattagaaagggttacaaactctcaagtttgaatccaagactggctgtgtgaccttgggtgagtccctgtccctctctgaggctcactttcctcatttgtaaaacggagagctctcttaaatttttttttttttttgagacagtcttactctgttgcccaagctggagtacaatggcgcaatctcagctgaccacaacctccgcctcctgggttcaagtgattctcctgcctcagccttctgagtagctgggattacaggcatgtgccaccatgcccggctaatttttgtatttttaatagagacgggctttcaccatgttggccaggctggtctcaaactcctgacctcaagtgatctgcccgccttggcctcccaaagtgctggcattacaggtgtgagccaccacgcctggccctgagtgtttttaaggatgtaacagcaacagtaatgttcactaagcagctagtgtggatttactcagtaactcaccactgagttactgtgagtccagtgagggaggtactattatttatccaccttttacaattaaggaaagggaggcaaagaacaatttgtcacacctttggtaaatggcagggcaggggtttgaagccgggtactcaaaggccagagaagaaaatagagctttatgatttttaacatgtattaggataagattaatctgacctcttttttttggaaagaggtgatacgacttcctggttcagggaaggctattgtcagaaagtctcaaactcagatgcaaactcgtccactagcttgctgtgtagagcatgtattttaacctctctgtgccttttttttttttttttaagacggagtctgactctgtcgcccaggctggaatgcaatggcgtgatcttggctcactgcaacctccgcctccaggtttcaaccaattctcctgcctcagtctcccaagtagctgggattacaggcacgagccaccacgcccagctaacttttgtatttttgtagagacagggtttcaccatgttggccaggctggtcttgaactcctgacctcaagtgatctgcctgcctcgacttcccaaagtgctgggattgcaggggtaagctgtgccttctttttgaaacaggctctcccttggtcacccaggctggagtacagtggtgtgatcacagttcactgcagcctcaaccttttgggctccagtgatcctcctgcctcagcctcctgagttgctgggactataggcacacaccaccatgcccagctaattttttattttttgtagagacagggtctcattatgttgccaggctggtctcaaacacctgggctcaagcgatcctccctcttggcttcccaaagttttgggattgcgggtgtgagccagtgcgcctggctgtggatttcgtttttgttttcgtttaagatcatgctgccgggcgctgtggctcacgcctgtaatcccagcactttgggaggccgaggcgggtggatcacctgaggtcaggagttcgagaccagcgtggccaacacggtgaaaccccgtctctactaaaaaaaaatacaaaaattagccgggcgtgatggcacgcgcctgtaatcccagctactcggggggctgaggcaggagaatcgcttgaaccctggagacggagcttgcagtgagccgacatcgtgtcactgcactccagcctggcgacagagcgagactccatctcaaaaaaaaaaaaaaagatcatgctaccagactgctataaagtgctgaacaaatatgaataattttactttagtggattttgatggtggcaccctggaggggaaactttggaaactgggatcctgaattgtgccctctagcctccaaatgtatctccagacatttgtgtctttgaaaaacctgtttgtggctggtcccaaggtagtgacttatctcaattgattgttcacagttacagatcgaactccttgttctactctttccccccttctcactactgcacttgacttgtctttaagaaaggaagaaggggtctggcacagtggctcacacatgtaatcccagcactttgggaggccaaggcaggcgaatcacttgaggtcaagagttcgagaccagtcgggccaacatggcgaaaccctgtctctactaaaaatacaaaaatcagctgagcatggtggcaagtgcctgtaatcccagctcgggaggctaaggctagagaatcacctcaacctagaaggtggaggttgcagtgagccaggtccacgccacggcactctagcctgggtgacagagactttgtctcaaaaaaaaaaaaaaaagaaaagaaaagaaggccgggggcagtggctcacgcctgtaatcccagcactttgggaggccaaggcgggtagatcacgaggtcaggagatcgagaccatcctggctaacatggtgaaaccccgtctctactaaaaaatagaaaaaattagccaggcgtggtggcgggcgcctgtagtcccagctacccaggaggctgaggcaggagaatggcgtgaaccggcgaggcggagcttgcagtaagccgagatcatgccactgcactccagcctgggcgacagagcgagactccatctcaaaaaacaaaacaaaacaaaacaaacaaacaaacaaaaacaaaaagaaaagaaaaacatgtttgcaataatatgcacctagaacctgactattttgttcataaacacaaatttttttggctccaagaatgcaaggaccacgaaagtctgggctttgttttgtttgcaaattgcaaatgttgttcacaagtttggaaaatgatgtccccagaacctatgttgctgtctttgcctcaccagtgccctcctgtgcgttcgttggtgcttgttgctgtcagtacaacagcaccgtgacactctactgtgacgctaggacaggcaaagacacgggacaacctcatcatgtgtcctagtggggcatacccaagcattacccattgaaaacatggtttattgctgtgtaagttactctcactttccttctcctttgtactagttatggcatcatactattattttattttatttttttattttgtgatggagtcttgctctgtcgcccaggctggagtgcagtggctcgatctcggctcactgcaacctctgcctccagggttcaagcaattctcctgcctcagcctcctgagcaactgggactacaggaggtgccactatgcccagccagctaatttaaatatatatatatttttttattatttatttattttttattttattttattttattttttattttttttagtagagatggggtttcaccatgttggccggactggtctcgaactcctgacctcaggtgatcctcctgcctcggcttcccaacgtgctgggattacaggcatgagccatagcaccctgccccaatactattattttaaaataatctttgtaaatctgtgtaattacctctttcatcttgaattaggacaggtggcattgcaaaatattagtttttagaagtgggtactgggctgggcacacctatagtcccagcacttttggaggttgaggtaggaggattgcttgagaccaggagtttgagaccagcctgggcggcgtagtgagaccccatgtctacataaaaaaatttttaaagttgcgcatcctgatgcacacctgctgtcccacctactcaagaggcttaggagggaggatctcttgagcccaggaggtcaaggctgcagtgagctgtgatcatgccatagcactccagcctgggtgacagagcaagaaactgtctctcctccccccaccccaaaaaaaagtgggccctggaaaaaaaaatgccctacatctaatcaaacctttaaatcttacagcaattatggggatagagaaacatgctgcatgaaaccatgaggtaagtcgaaaagaatgtgagacatacctcaggaaaaatgacccattttttttgccctctaatggcttcaaacaagaggcaagggggatctgttacagaataaaagagacttaggaacaaacgaccggtagggcgtggtgactcatgtctgtaatcccgacacttcgggaggccgatgtgggcagatcactaaaggttaggagttcaagaccagcctggccaacatggtgaaaccccctcactactaaaaatacaaaaattagctgggcgtgttggtgggcacctgtaaactcagctactcaggaggctgagccaggagaatcgcttgaacccaggaggcggaggttgcagtgagccaagatcacgccactaccctccagcctggacaacagagtgagactccatctcaaaaaaaaaaaaaaaaaaaaaaagagaagcaaacaaccaaataccttgagtagatctttggatttcaatttgaagaaacaactattcctccttcccccagctctatcgcctggagtgcaggggcatgctcacagctcacggcagctttgatttcccggagtcaagagatcctcccatctcagcatcctaagtagctgggactataggcatgtgccacaacacctggccagaaacaactgtcaaaagaaaatttagggctgggtgccatggtgggcacctgtggtcccagctactcaggaggctgaggtgggagggtcaggagttcaagcccagcccaggcaaaataggaaaacccagtgtccaaaaaaaggttcaggcacaaacaggggatttgaatatttgaatatagactgggtattttttctgtttttgaggcagggtctcgctctgtcacctaggctggagtacagtggcataatcacggctcactgcagccttgaccatcccaggctaaaatgatcctcttgcctcagcctcccaagcagctgggactataggcagtcaccaccatgcccagctaattatttgtagacacaaagtttcaacatgttgcccaggctagtctcaatctcctgggctcaagccatccacctgccttggcctcccaaaatgctgggatcgccagcaggagcctctgcatctggcctggattggattttttttatatcaaatatttctgatttttttttaagtatgaacatgaaggttattaaaaaataaaaataaaagggccgggcgccatggctcacgcctgtaataccaacactttgggaggccaaggtgggcggatcacctgaggtcaggagttcgagaccagcctgacaaacatggagaaacccccctctctactaaaaatagaaaattagccgggtgtggtggtgcacgcctgtaatcccagctactcgggaggctgaggcaggagaatcacttgaacccaggaggcagaggttgaggtgagctgagatcctgccattgcactccagcctgggcaacaagagcgaaactccgtctcaaaaaaaaaaaaaaaaaaagtaagcctgttgtcagacatgtgtacccaaaacatttatgtatgaattgacataagcccgggatttgttttaaaatcatcctgaaaatatttttttgtgaaattgatcatcgttgatgataggtgatggatgtctgaatgttcttcatactattctctctacttttgtatatgtctgaaattttccatagcaaaaagtgaacccaaaataaagttgttaaaataaaatagatgagcatggtggtcatctactttcttctaaactacatggtgcaagtgtagtcttagctactcaggaggctgaggtaggaggctcacttgagcccaggagttcgagtccagcctgggcaacagagcaagaccctgtatctaaaaataaaattcatagtcgggtgcggtggctcacgcctgtaatcccagcactttgggagaccgaggcaagcggatcacgagatcaggagatcgagaccatcttggctagcacggtgaaaccccgtctctactaaaactacaaaaaattagctgggcctggtggcgggcgcctgtagtaccagctactcaggaggctgaggcaggagaatcacttgaacccaggaggtggaggttgcagtaagccaagatcgcgccattgcactccagcctaggcgacagagcgagactctgtctcaaaataaaataaaagtaaaaataaataaaataaaataaaatgaaataaagtgtgtcccagggcctagcacatagaaggtcttaaacaaatgttaattttctcctctgacctcaaagaaactagggcagcactttccatataattctctgcaatggtggaaaaattatctatctgctatgtccagtgtggtggctgagcactcaaaatgtgggtagtgggattgaagacctgaatttttgcctttgcttgactggattttgaaaaagaaaaaaaaaaaaaaaaaaagcgggccaggcatggtagctcacgcctgtaatcccagcactttgggagaccgaggtgggtggatcacctgaggtcaggagttcaagaccagactgaccaacatagtgaaacgctgtctctaataaaaatacaaaattagctgggtgtggtggcaggtgcctataatcccagctacttgggaggctaaggcaggagaatcttttgaacctgggaggaggaggttgcagtgtgccgagatggcgccactgcactccagcctgggtgacagagcgaggctccgtctcaaaaaaaaaaaaaaaaaaaaaagggcagggtcaggcacagtagctcacacttacaatcccagcactctgagaggttgatgctggaggattgcttaagcccaggagttcgagaccagcctgggcaacatggcaagaccccatctctaaaaagaaaagacctgaattttatttaattttaattaattaattaattattattataattttgttttttggttttttttttttaggcagagtctcgctctgtcacccaggctggagttcagtggcttgatctcagctcactgcaagctccgcctcccaggttcgcgccattctcctgcctcagcctcccgagtagctgggactacaggcgctcgccaccacgcccggctaatatttttttgtatttttagtagagacggggtttcaccatgttagccaggatggtctcgatctccgaaccttgggatccgcccccgtcggcctcccaaagtgctgggattataggcatgagccgccgcgcccagccaattttaattaatttaaatagcgacaggggctagtggataccacagtgaactatggagctctaatgacttggaatcagctggagaaatcatatatatatatatatatatatatatatatatatatatatatacacctatatatatatacctttatatatatatatacctttatatatatatacctttatatatatatatacctttatatatatacctttatatatatatacctttatatatatataccttcatatatatacatatatatatataccttcatatatatatatatacctttatatatatatacctttatatatacctttatatatatatatacctttatatatatacctttatatatatatacctttatatatatataccttcatatatatacatatatatatataccttcatatatatatatatatatacaccttcatatatatatatatatatatatatatatatatatatatacctttatatatatataaataactgagactttgtcaccagggatagagaagtggctgctactttgtaaattggacaggaaggtggccactataatctggagattaagcgatggggattagggatagagatgcttttgtgatgtggatcagatcaaatacagatgggtgaaagatgatacttcctaagcaggatgcaattattcagcaaactaatctgtgttgttcctgcccctggggacagagctgggagcaagaacaacaggtcctcctctcatgcactcacagcctatgagatgagcaaaagccaataatcaagtaaggaggctacgcatgcacaatggcttatggctgtaatcccagcattttgggaggccaaggcaggcagatcacttgagttcaggagtttgagaccagcctgggcaacatggcacaacctcacctttacaaaaaaattagccgggcgtggtgacatgcgcctgtggtcccagctactcaggaggctgagacaggagaatggcttgagcccaggaggtggaggttgcagtgagccaagattgtgccactgcactccagcctgggtaacagtgcgagactctgtctaaaaaaaaaaatagataaaaaaataaaattaaattaaattaaatttaaaaagaaattcaaaaataagaaaaattttacaggctaggtatagtggctcgcgcctgtaatgccagcagttttggagacccaggcgggaggatcacctgagtccaggatgttgagcctgcactgagccatgatggagacactgcactccagcctgagcaacggagcaagaccctgactcaaaaaaaagaaaataaagacaagtatcaaggcaatggtttgtagctagaaacacagagcatcctgacccaacggcaccaaggagggaaaagtattagacacatgctaatacttcagacaaagaatttgtttttttttttagacggagtttcgctctggttgtccaggcgagagtgcaatggcacgatctcgactcaccgcaacctccgcctcccgggttcaaacgattctcctgcctcagcctcccgaatagctgggattatagacatgccccaccacgcccggctaattttgtatttttagtagggatggggtttctccatgtttgtcagactggtctcaaactcctgacctcaggtgatacaccatccttggcctcccaaactgctgggatacaggcgtgagccaccacgcccggctgacaaagaattattatccccattgtaaagatgaagaaattgaggcttagagtttaaaatcttgcttaagttttgtagctctgagaggggagagaaagcctgtgtgggaagaagcagacaggaaaggccttctcagaacacgactggatctgaaaacccctcacctgtccacacctgaggcggctcctcttcctgctctcgctcagcctcctccaaaaaatcttccagaagcttctctgctttttgagcctcagcactccctggggccgcccagcccagaaaggttcggacactgcccaggtccgaatgggcagggtggtctcggaaatcctgagggtggtcctgcagccaggagcccagcactgacaccacagccctggccagagaggcagggtctcagagctgggtccagagtgggggacatagaatatgactcctggtaccttttttttttttttttttttgagatagagtcttactgtgtcaccaaggctgcagtgcaatggcctgatcttgactcactgcaacctcagcctcccgagtagctgggactacaggcatgcgccaccacacccagctacctttttttgttgttgttgtatttttagtagagacagggtttcgccatattggccaggatggtctctaactcctgacctccagtgatccacctgcctcggcctcccaaagtgttgggattacaggcatgagccaccacgccccacctgactcccagtctcttattacccaacctgcaattttcaaaaccccagtccgactgctaacctttgacctcttggatttccctccccgcactcccctatctggatgaaggacccacctcaggttcttgttgaagctcagatcttgtaccgctgtcttcttgatctctaccctgggaagaggccccccagcaggtgaagaagggggaacctagagggggcttaggaagagggctctgggtctgggaggtgtttccaggttccacacctgaggaggtggaggggggtgcccagttggggttctagggtggagaatacggaggttatggttcgctactgacccgggaggtgggggcggtggcattggtggcagcagaaagcccagcaggcaggcagtgggtacaaaggtccggtaggtggccaggaaggcgggcatgaagctggggtcctgctcacggtctccaaacaccaactctcccaccagccgctccaggcgcgctgccctcagcaccctcaccttgctggttcgatagtggaggaaggtattggcaatggggctgggagcctgcaggaggggagaggtggccatgagagagcaggagtggtcctcacagcaccccttctctagtcacattcatcactagcaccactctttttttttttgtttttttttttgagacagagtctcactctgttgcccaggctggagtgcagtggcacgatcttgggtcacttcaacttctgcctcctgggttcaagcaatcctccttcctcagcctccaagtagctgaaactacaggcgcacaccaccaagcccagctaatttttgtatttttgtagagatagggtttcaccatgttggtcagactggtctcgaactcctgacctcaagtaatctgccccccttggcctcccaaagtctcccaaagggctaggattacaggcgtgaaccaccgtgcccagcccctagcaccacttttttttttttttttttgagacagaatctcactctgtcacctaggctggagttcagtggcgtgatcttggctcactgcaacctccgcctcctgggttcaagcaattctctgcctcagcctcccaagtatctgggattacaggcacccgccaccaagcccagctagttttttcgtatttttagtagagacggtgtttcaccgtcttggccaggttggtcttgaactcctgacctgatgatccacttgcctcggcctcccaaagtgctgggattacaggcgtgagccacctcgccccgcctgtagcaccattctttcatgtgattcctctgtctcccggcttcttggagttattgttttggtttgttttttttagaaacaggtcttgttttgttgcccaggctggggtgcagtggcacaatcatagctcactgcagcctccaagtcctagactcaagcggtccctctgccccagcctcctgagtagctgggaccactgctgggcatcatcacgcacagctagttttttaatttttatttttattagagagaatcttgctgtgttgtccaggctggtctccaattcctggccttctgccttggtctctcgaagcgcagggattataggtgtgtgccccactccctgcccgcttgaagttattgttcctccccatccacaaatagctcctgcaacttgccctggaaaccctccctctcccatgccctgtcccctactccctctcccgtcccctccccctcccgtcccctccccccacccccccgcccccgccccacacactcttttccacccagggcttccctcagccctcctgtcgcgcttcactggctgccccatccgccctcacctagccacttctaaaccaaccccattccaccttccagccccggccctctaaacctgcctttcccaactctgccgtccagttctgtccttaccaagttgtccctaggctcctctcgggaactgcgcggccatcgcctggccccaccccattccctggatctccccccacttacctggccgcccccagtcccctttctacctggtcgcctcatctggtcgcctccgagcccctcccttccttccgcccactgcacctggcggcctgtgctcggctctccagctccgccctcaactggtcgcttccggccccgcgccacccaccaaaccccctcctcacctggctgcccccggggccctccgccgggctcctgcgctgactgcgctgccgccgcagggagacactgtacaccgcgccgtcctcggtctcttcaccccagtcctgcagcggtgcctggacgcacaggcggactcagggcaccaaaggggcacaggtcctggggcctcagcctccttggccgctcggactcgggccgagtcctcctgctgcatccccacgccccttcccggccagaagctgcgagactagggctggggtcccaggctagtcccctcctcgctgcgggtcccctcctcccaggtcctgaggacatggggtggcatttggggatgtcccagggcccagtctaatagaacctgtctctagctctttctgccgactgcgctcagagactcgcgcccccatccctaagaggaaccagtcgcttcactgggtcaagggccgcgagtccccaggaggggactccagggcaagttcagattgggagcagataccgtccgacgggcgggcgcttggagtttctggacctgcgggtcaccagggatgcggggtccggggatcccttgtccccttaccagggccagctctttgcctgctgtgcgctccatggccggcgcccgtccctctcagtggcgccgctgagtgaggcggaagggccggcgggtggcgggtggcgggcggcgggcagtggccgggcgctgaggccagaggggcggagcggccgagctgctggggcggggcggggcagggcaggccggacccagcctctgggtgcctccagccggacccagcgccagcccaggagaggtcctggctcttccgctgggtgcctatcaatctgtccccagaagaaaggacatatctgtccccaaggggtcttttttgtatccccagatgtgggggagctcctgtgtgggggcatgtgtgtgtccccagaccagagtcctctgtcctccagtggaaggggctagcttgatcaagtgtgggggcatcttccactttttattattattgctattattttgagatggagtctcgttctgtcacccatgctggagtacagtggcttgatcttaactcactgcaacctccgcctcccagattcaaaggattcttgtgcctcagcctcccaagtagctaggattacaggtgccgccaccatgctcagctaatttttgtattttttgtagaggcggggttttgccatacttgccaggctggtctcaaactcctggcctcaagagattcgcccacctcagcctcccaaaatgctgggattacaggcatgaaccacggcgcccagccttattattttttagagacagggtctcactcctgttgccaaggctgcagtgcagtggcttgatcttggctcactgcaatctccgcctcctgggttcaatccattctcctgcctcagtctcccaagtagctgggactacaggcatatgccaccatgctcagcttttttttttttttttttttttttttttttttttttggtaaaaactggttttcaccatgttgcccaggctagtctggaacccctgggctcaagcgacacacccagctcagcctcccaaagtgctgggaatataggtatgaatgagccactgcaccccgcccttattttatttattgagacagggtctggctctgtggcccaggctggagtgcagtagcacgatcatagctcactgcagcctggagctcctggactcaagtgatcctcccaactcagcctcccaaaatactgggattacaggcataaaaccactacatcgggccatctcccatttttaagctccatctgcgtcactagctgatgggagtcatcatgacccaggttggaggaggcagtctgtggccctgggttttcagggacagccgtctcttgggtggtgcagggtcaaaaacagatgaatacccaggggcatggtcggtaacatttattgcgcaactctgaggccggggcggacccagctggggagatttactgtgggaacgtctggcccggccccttcctcccctccgggcgccgctggccgcctccgttcccggtccgggccgcgttcagcccctgaaggggccccgtggggcctgcgctagacccggagggatcgggggctccgaagggggccgcctggtgggtgtcaggacgagtctaggacctccgagagcgacggtgcttcttgtgactttcgattaatttctgggaacggatcttgagtgatgcgcgggtcactacctcgttgtcctcctcctcactctcttcgtctaaggggggtggggggatgagcagggagcgatgtgggatccaggtccccatccctggctccccttccctttaccaccccactccacccccaccttggccctgaacagggtatctgacaacctcctgctacccagcttggggccccaaccgcaccccttcatccccccacccatactgaccaaaaaacttgtccttggaagtggcaaggggcagggcgatgcgggtgttgtattcgggcagccttccctctaagctggcgaggaactaagcggggatgggaagcgagagaggaaggtgggcggggccaggggccaccgagaagtcacgttccccctcctccctaccccattccgagatatgccctagttccaactggagaccactgcccactcccatccctccttaagcaggcaccttgatacccagcttcaccccctcatcactcaggtccgcccctggtctctggggccctgccactaggcctctccccatccggataccccagccgcgtcctctagcctcacaggacccgcctgcacctcttctggtttcttccctcgtggctcgggctcacccctggctcgtcaaacctcgcccgttgtccccgagaccccttcctggctgatcagcctgcaatctggtctcccgaagttgcccccggttccctggttttccgacccagccctactcctagatctctggagctctgccccatggctgcagggcacctcgcggttagcgatgtggcacagcatctcctgcacgtcgtggccctggagctgcgcctgcagtttcagcagcttttcctccacgaggcccagcaggtttggcacatagttatctgcctggggatccagctcctttcccgcgaagcggccgtcctcctgcggccagggtagagccgggtcagccgagaggggtggggcctcttggaaggctccacccaggggcggggcttttctttcgggggcggggcctaggaggtaagggcccacctgcagggtcgatcctagccattgggggcggggacttaggtcaaggccacgtctgtgatgggggagcctctgaactctaactctatatgtaaaggtttcggggaggcctcttgggaacagtaaggattcgagggaggccattgtgggatggcctcctgaagaaatggccctctgctgcgggcaggataggtcttctgtctcgggctgctccagaactgcagataggtctccgagcttttcggggacagggtgggacttctttcccttggaggcggagcttgagacgggacagggtctctgacgtcttgggcttccttggggagtgagagcttccccagggaggtggggcggggactctgaggaatggggtggggcttcccctgtgggcggggcctctgacgtccgggacagaggatgtggcaggccacgttccctcgggcaagctggtgtggcaggaaccccgcttcgtggctgcgcctctgcggtcccaggagggcctgtcggggcttcccctgggcggggcctaccacagtgatgtggatcagcttgctggccaggtgctccaggctgtccttggccacttgcatcgcccgcaaggcgcgctccagctggtccttggcctcggcgtgccgccgctcctccttcttgagacgctcctgcgcctcggcttgcagtttctgctggctgcagggagccgggaggtcaccccgggggctcagcccgccccgccgccctccccagagccccggtgcctcacctcaccagcgtggcctcccccgagtacttgaggtcttccagctcccgctgcagttgttgcttctcctgcttcagcctcaccaacgtctgctcgttctcgctcttgagcgtctccaactgcgcgaaggtgtcgccctgggccaggaaccgccgcaccaacgactgcgggccacccagccccagtcagagccagggcctagggagcgtaggggcgctccacctcctctcccccaccctgcgaaccctcgcacgcaggacaggtggcctgagctggcgccttttgcacagcaatgtatggggacactgtgggttggacgcagggttgcttcaagggtgagcagccctggatatatcatttttgcggggccctttctggcctatataaggaatttgagtcagcccaaactcgggggcaactggagaggcgagcatagcttctttccaaaatcaaagtgccatcaatttctggccgtgaatctcgcccgattccgcaggaaataccgcccgtcttcggagccatccgctcacaaggcccacatctggaaaggggctgcgcctcagtgccccagatgaccccataggtgtactcctataggtgggagtcccggaagtcatcaggggtcggccccatcggaggagcagcaggttggcggacacccagaggggagaaacagggttggggtccagtgttcaccggcgggaaccaggacccaagggggacacagcggtcttagaataatgcaaggaagactttacagtgagggacccggcgcagggaccccacttgccaggatctgaggatggtactgggcggtccactgggtcccagaccatgttacagacactggagacagaacaagagacgaaactcccagttctcctagagctggcatggcaaaggagttagcatggtgcaagagagaacggaaggcgagtgtagaaatgacggcgagtgtagacagctcctaggggttttgctgcgaagggcagcagaaaaactgaacggtagctggagggggaagggatgtttttcaagaaaggagcaggtttgtgagctgaataaccgacctggcagagaggggagacagggtgtgtcggtttcaccggcttaggcacccctggggcccgtctggggtggggggggggcgcggcggagagggctgcgggcagaactcacgtgcgtctcgtcagtgccagtggcgtccttgaccttgccaaagatcacctccatctggtacatgctccagcgctgccgcagctcctcctccttggcatgcaggctgtcctggatggtgtcgtcggactgtagcagcaggtgctcgcggtgggtctgctcgtgggttgaggtcagagccagggtcagctggtggacagcgcttgggaaggaggccggggagggggatccagataggggcccgcgaggaacagggctcaaactggagggaagggagagggcaaaagcttggggccagataaaggcacccgggcaggtgtcaagaaagtgggacaaggtcgggcgcgggggcggtggctgtggctcacgcctttaattccagtactttaggaggctgaggcgggaggattgtttgagcccaggggttcgggaccagcttggacaacacggcgagaccccgtctctacaaaaaacaccaaaattagcagggcgtggtggggcgcctgaagtcccagctacttgggaggctgaggtgagaggatcacttgagcccaggaggtcgagactgcagtgagctataattagtctgagcgacagagaccgtgtctcaaaaaaaaatccatatatatatgtatatatgtatatatatgtatatatgtatatatgtgtatatatacctatgtgtatatatgtatatatgtgtatatatacctatgtgtataaatatatatgtgtatatatacctatgtgtatatatgtatatatgtgtatatatacctatgtgtatatatgtatatatgtgtatatatacctatgtgtatatatgtatatatgtgtatatatacctatgtgtatatatgtatatatgtgtatatatacctatgtgtatatatgtatatatgtgtatatatacctatgtgtatatatgtatatatgtgtatatatacctatgtgtatatatgtatatatgtgtatatatacctatgtgtatatatgtatatatgtgtatatatacctatgtgtatatatgtatatatgtgtatatgtacctatgtgtatatatgtatatatgtgtatatgtacatatgtgtatatatgtatatatgtgtatatgtacatatgtgtatatgtatatatgtgtatatatacatatgtgcatatatacatatgtgtatatatgtgtatatgtgtatatatgtatatgtgtatatgtacatatgtgtatatatgtatatatgtgtatatgtacatatgtgtatatgtgtatatgtacatatgtatatatacatatgtgtatatgtacatatgtgtatatatacatatgtgtatgtgtacatatgtgtatatatgtgtgtatatgtacatatgtgtatatatgtatatgtacatatgtgtatatgtgtgtatatgtacatatgtgtatatatgtgtatgtgtacatatgtgtatatgtacatatgtgtatatatgtatatatgtgtatatgtacatatgtgtatatatgtgtgtatgtacatatgtgtatatgtatatatacatatatgtgtatatacacatatgtgtatatgtatatatacatatatgtgtgtgtatatatgtatatatgtgtgtatatatgtatatatgtatatatgtgtgtatatatgtatatatgtatatatgtgtgtatgtatgtatatatgtatatatgtgtgtatgtatgtatatatgtatgtatatgtgtatatatgtgtgtgtatatatgcatatatgcatatatgtatatatatgtatatacgtatatatatatatatatatgcaaaaaaaacctatcaaacaacaactacaacaacaacaacccaaaaaacaaaaaggcaggacagggctttggtgagggctggatgggaggcagcctcagggcaggtgcaggggcggggccaagagtgagggggcagggccttaggcaacggttggctcagaggcacggtcagattcaggacaggcagtctagtcaggtgggaaaggatgggtaggggggtcactgagtaaggggaaggctggaggccatgtcagagccaaaatggtgcagtcgcttaggaggggaggggaggagaggcggggtcagggatgtgggaggggtcttcgcaccaagtgggggtggagtcagagagggggcggggttaggagaaacagaaaatgggagaaggcctaggatgagggagagccagggcatggctggtttgtgctgggctgggctggagtcacaggcgcgcacccctgggtgcgcccaccttgcgctccatgcgctcgttctccagtttcttctcctcggcgcgcttcttgcactcacttatgtagcgttcccgcttcttgcgctctcgaaccaaggtctcctctaggtactgcagctggttctggagggcgggcagggtagcagggagaccagctggcacctaccactgcccgccgcagggtgctgggagatagatgggggcgggggcgtaggggaagctcagggacagctgaggtcagattctcaagctgggagaccgcggcagctgggcaggatggccgagggcaagaggggtggcaccttggcaatgtcccgggcattgagggcctcttggttcaccacgtgcagtgcctccagctcatgtttggtcctcaccacctcagcctccatggagtccagccggttctccaagttgaggctctcgtcctggggcgtggtggggaggggtagcggagatggtgcaggtctgtgactgctgtccctagccaagcccgccctccctgtttgtcatctcacccgagccctcctagtccctaccattagataggccttgagctgcaggtacacgctggtaatgtgctcggcctcctgcgccttcatctgggccttctccaggcggttctccaggttccgcatggtctggagagcagcagggctgggctgagggccctccgcactcaatccctcccacacgaccctctgccctgcaggcctcacccgcccctaccttggccacctccgtgtgtctgttttgcgcctccgccatctccagaaggcgcaggctgtgctgcagctggagctcctccagccgcctctgccgcaacaccacctggtgccgcagggcgttctgctgcttcaccttctccctcagccggtggtctaggtgctccagggcctgccgcaaggaggggagcgaaagcaggagcctcaacaccctaccccgacacacacctagcccttcctcccttccttctcccacactgtggcttccaggactcccctctcccgttttctacccacctccctggccaccccttctgtgttgtttttgtagagagagcaccggagtcttctctctgtctatatcgaccaccttggcgatcttacaccggctcagggttctaaaaaaatatttttaaatttttctttctttcgtttttttttttttagacggagtcttgctctgacacccaggctggagtgctgtggtgcaatctcggctcactgcaacctcctcctcctgggttcacgccattctcctgcctcaacctcccgagtagctgggattacaggtgcccaccaccacgcctggctaatttttgtttttgttttcttttcttttttttttttttttgaaacggagtctcgctctgtcgcccaggctgaagtgtagtggcacgatctcggctcactgcaacttccatctcctaggttcaagcaattctcctgcctcagcctcccaagtagctgggattacaggcatgtgccactacacccggctaatttttgtattttgggtagagacagggtttcaccacgttgaccaggctggtctcaaacgcctgacttcaggtgatccacctgcctcggcctccgaaagtgctgggattacagacgtgagccacctcacccagctatcttctggccatttttttcttttaaaaaatgttttaggctgggcgcggtggctcccgcctgtaatcccagcactttgggaggccaaggcgggtggatcacgaggtcaggacatcgagaccatcctggctaacacggtaaaaccccgtctctactaaaaatacaaaaaattagccgggcatggtggcaggcgcctgtagtcccagctactcaggaggctgaggcagaagaatggcgagaacccgggaggcggagcttgcagtgagccaagatcgtgccactgcactccatactgggcgacagtgcgagactctgtctcaaaaaaaaaaaaaaattatagaggcagggtctcgctatgtggctcaggctggtcgcgaattcctgggcccaagccatcctccttcctcggcctcccaaagtgctgagattacaggcaagagccactgcacccagcccagttttgttttgttttgttttttgagatggggtctcaccctgtcactcaggctggagtgcagtggctcgatcttggctcactgcaacctccgccccttgagctcaagtgatccttcctcctcagcgtcctcagttgctgggaccacagatgcatgccacgacgcctgggtacgtttttgtatttttggtagagacagggtttcatcatgttgcccaggctggtcatgaacttctgagctcaagtgatccacctgccttggcctcccaaagtactaggattacagacgtgagccatcacgcccagccttttaatttttataattattttttcagacaaggccttgctttgtcacccggacgggagtgcagtggcacgaacatgactcactgcagcctcgacctccccagttcaggtgatcctcccacctcagcctggcaagtagctgggactacaatcctgtgccaccacatttggcaaatcttctgtatttgttgtagagtcaaagtttcactatgttggcaggctggtctcaaactcttgggctcaagtgatcctccagccttggcctcccaaagtgctggtattacaaggcatgagccaccatgcctagactgtgttttattttttatttatttatttatttatttatttatttatttatttattttgagacagagttgcccaggctggagtgcaatggcatgatctcggctcacagcaacctccacctcccgggttcaagggattctcctgcgtcagcctcctgagtagctgggattacaagcatgcaccaccatgcccggctaattttttgtatttttagtagagacggggtttcgccatgttggccaggctggtctcaaacgcccgacctcaggtgatccgcccgcctcagcctcccaaagtgctgggattacaggcgtgagccaccgcgcccggcctttaattttttatcttttgtttttgtttgtttgtttgtttttgtttttttgagacagagtctcgctctgtcacccaggttggagtgcagtggcaccagtctcagctcactgcaagctccgcctcccgggttcaaactgttctcctgcctcagactcctgagtagctgggactacaggcgcccaccaccatgcctggctaattttttgtatttttatttttattttattttttatttatgtatttatttttgagacagagtctcactctgtcgcccagactggagtgcagtggtgcgatctcagctcactgcaacttctgcctcttgggttcaagcaattctgtgcctcagcctcctgagtagctgggattacaggtgcctgccaccacacctggctaatttttgtatttttagtaaaaacagggtttcaccatcttggccaggctggtctagaactcctgaccttgtgatccacccacctcggcctcccaaagtgctgggattacaggcatgagccaccgcgcccggccttttgtatttttagtagagacggggtttcaccgtgttagccaggatgggctcgatctcctgacctcgtgatccacccgcctcggtttcccaaagtgctgggattacgggcgtgagccaccgcgcccagccttttttttttttttttttaaagaaacaggttgtactgtcactcaggctggagtgcagtggtgcaattgtggctcattatagtctcaaacttctaggctcatgcaatcctccagcctcagcctcctgaatagctgggattacaggcatgtgccactggtcattgttttcgtttgtttgttttgagactgagtctcactctgtctcccaggctggagcacagtggcacaacctcagcttactacaacctctgcctcttgggttcaatgacttttaaaatgttttattttttttaattatttttattttatttattttttgagacggagtttcgctcttgttgcccaggctggagtgtaatggcacaatctcggctcactgcaacctctgcctcccgggttcaagcgattctcctgcctcagcctcccgagtagctgggattacaggcacgtgccatcatgcccagctaagttttgtatttttagtagagacagggtttctccatgttggtcaggttggtcttgaactcccgacttcaggtcatctgcccgccttggcctcccaaagtgctgtgattacagacgtgggccaccgcgcctggctgtgatgtttttttttttaacttgttttccctattaggatatgagctgtttttagaagtggagacttggtctgctttttcactgcatttactaccatgccaggatgccagatacaaggaaagtgagtaataaagatttaattgaatgagcacatgaatggcagctagtgtgcaggaaggattggagagggtgagcctggagtccagtggtgaggggacccaggctggaaatgaaggaggaggtggggcgagggtgggcaaacctgtcctgtcctgttcttcaggtatggcttctcccacttccattcgcgaatcactgcctggaccactttctcatctccctgcaaggagggaagtccagtcacctttcagcatgccacctccagctaaggccaggtgctacctacttgtcccccaccatccaccgccacgggaaccctacacccacccctttgccccttaccttgagcaggtccagcagctttagttccagtgccttagtctccttgcggagctgactgatggtctcctggttcttcttgatgttccactgagagctctcaaaaaaagccttccggtcaccctctggcaggcaggtgaggtggacagacacacagttactgggtgggtgcatgggtgcaacatcccagaggaaagaccttttttgcaatcatcaactttttttttttttttgagatggagtttcactcttgttgcccaggctgcagtgcaatggtgcaatctcggctcaccacagcctccgcctcccgggttcaagagattctcctgcttcagcctcccaagtagctgggattacaggcatgtaccaccacacctggctaattttgtatttttagtagacatggggtttctccatgttggtcaggctggtctcgaactcctgacctcaggtgttcccaaagttctaggccccctaaagtcctaggattataggtgtgagccactgtgccaggctcatcaacttaatattataagaatgcagtcgttgaccagcctggccaacatggtaaaaccgcatctctactaaaaatacaaaaattagccaggtgtgaggctgagcatgatggctcgttcctgtaatccttgcactttgggaggtagaggcgggcggatcacctgaggtcaagagttcaagatcagcctggccaacatggtgaaaccccatctctacaaaaatacaaaaattagctgggcatggccgggcacggtggctcacgtccataatcccagcactttgggaggccaaagtgagcggatcacgaggtcaggagatcgagaccatcctggctaacatagtgaaatcccgcctctactaaaaatacaaaaaaaaaaaaaaattagccgtgcatggtggcaggcacctgtagtcccagctactcaggggactgaggcaggagaatggtgtgaacctgggaggcagagcttgcagtgagccgagatcgcaccactgcactccagcctgggtgacagagcgagactctgcctcaaaaaaaaaaaaaaaaaaaaattagccgggcatgatggtgggtgcctgtaatcccagctacaggaggctgaggcacaataattacttgacctctggaggtggaggttgcattgagctgagatcctgccactgcactccagcctgggcaacagagcaagactctgtctcaaaaaacaaaacaaaacaaaacaaaaaaccccaaaatccttccatactcaagtcccacagtcagccctgtggaacctgcagatacaaacagttgtccctctgtatactcaggttttgcattccaggactgttgtattttcttttcttttcttttttgggactgggtcttgctctgtcacccagaatgaagtgcagtggtgctatcactgctcactgaagcctcaacctcctgagctcaagcagtcctcctgcctcagcctcccaagtagctaggactagaggcatgtgccaccacatctggctactttattttttgtagagtcaaggatctcactatgttgcccaggctggtctcgaactcctggcctctagcaatcctcctgcctcagcctcccaaagtgctgggattacaggtatgaaccactgtgcccggcctgcccatctcaattttttttaacttgaaaggatgaatgatatatgtgaacacatggtgttcaacggtcaactgtacttcactgtgagcatttattatgtgttggatgctggactaagaggtttccgaatgccatatatcacgtgccaataggtatccatggcatacgcatatcataccccttgcacagatgacaagacagaggcttgggctgattaaactgcttaaggtcacaagcaaccatgcaagattacccttttttttttttaagacggaatctcactctgtcacccaggctggagtgcagtggcgcaatcctggctcaccgcaacctccacctcctgggttcaagcccctctcctgcctcagccttccaagtagctgggattacaggcgtgcgccaccatgcccggctaatttttgtacttttagtagagatggggtttcactatgttggccaggctggtctcaaactcctgacctcaaatgatccgcccacctcagcctcccaaagtgctgggattacaggtgtgagccacctcgcccagccatgattacctcttaataatatcaacaaaagcaataataatagcttacacacaaggattctgcaacctcaggatgaccaacaactgggccgaataattatttgccgtggggtgctctcctgtgttttgcagaatgttgggcagcatcttcaactctgcccactagatgccagtggcagacacacacccacaacagacatccatgccaccatgcccggctaattttttgtatttttagtagagacagcgtttcaccgtgttggccatgctggtctcaatgtcttaggacattgccaaatggcccctgtggggcaaaccaacccttttccaacaagaaccactggtttacaccttatggtactttgctatgtgccaggcactgttctaagcactttacacatttcaggtacctatgttgtactgttactatccccatttcacacatcgagaaactgagaacaattaggttactcttagtcccccaaggttggacaactattatgcagagccaggattccaacccagaaaatctggctctaaaaatctatgctcaggccaggtgcagcggcccatgcctgtaaccccagcactttgggaggctgaggaggaaggattgcttgagcccaggagtttgagaccagcctgggcagcatagtgagaccccatctctacaaaaagtaagaaaattagccaagcacagtggtgtatgcctgtagtcccagctactcaggaggctgaggtggaaggatcgcttgagcctaggaggtcaagtctgcagtgaactgttatccaaccactacactccagcctcaacagcagagcaagaccctgtcagaaagaaagaaggctgggcgcggtggctcacacatgtaatcccagcactttgggagccaaggccgtggatcacttgagatcaggagttcgagaccagcctggccaacatggtgaaacccagtctctactaaaaatataaaaattaggtgtggtggcacgcacctatagtcccagctagtcaggaggctgaggctcgagaatcgcttgaaccttggaggcagaggttgcagtgagccgagatcatgccactgctctccagcctaggcgacagagcaagaccctgtctcaaaaaacaaaaaacaaaacaaaaaaaaacgcgggtgcagtggctcacgcctgtaatcccagcagtttgggaggccgaggcgggctcacgcctgtaatcccagcagtttgggaggtcaagagattgagaccaccctggccaatatggtgaaatccctctgtactaaaaatacaaaaattagttaggcgtggtggcgtgtgcctgtagtcccagctactcaagaggctgaggcaggagaatcgcttgaacccgggaggcggaggttgcagtgagccgaaatcgttccactgcactcccacctggcaacagagtgagattctgccaaaaaaaaaaaaaaaaatagagaaaataaattacaagaaagtatgaagtacagttcagtcggttctgaacccatgagaagttttaagagacagagaaggaaaaacatgaactaagtatgagtttttgcccagaaacggtttacctagactcatgctggagaaatacctttgtcacaccatgaagattggatgggcactgttgacccctgaccctctgtaccctctggagccatcttacctaacagttgtatctttttatgtaactcagccacctgagagtgcacagagggcttccctgcacctctgtggaaggatcctcccttggaacggcctggggtccacgcctgggctgtgcccttgcctcggaggtggctgggtttgcccgaagcctccctgcccttgaccctggaagagggcgtcgaagcctggtcctgaggaggcagggcgttggcggaggccgccctgcacagaggagatgtcatgatggggttggggctgaaggcccctaggggttagggggataactaggagtcagtcgcccctgtcagggatccgtcagctcggattcctagggctctgaaaaatgcactttccgaccgctaggtggttgcgctccgcatctctcggttgccaggtaaccgcctccccgtctctctccactgtttccatggagatcacccgcgttccgtggctgacactgcgttctcattggctgaggctgcatagaggggcggtcccaacagtgggcggggtagagccgcgccgcaggacggagggtctggacactttggggtcacgtgctcattccgtttccctacctcccccaaccttatcccgcccctgggggttcgcgggcatttttcaggaactttctttccggcttgagaagccgccactcccaagatggaggtacgctgcgccgccattaagagctagccctcagaactatcctctctaaggtttcacagtcctgcccaagatggccgtctcggctctggcaccgcccccactcctgcctctcccaacatggcgaccctgagtctccgttcccggtgcggaacgtacgaccggaagtgacggggtccagaaatttccgctttctttctgcagcaggaaccgcggctgctggacaagaggggtgcggtggatactgacctttgctccggcctcgtgtaggtgtgaacgagcgggtgggagggcacctcagtttcttacagggggcaaccggagggtgcatgtgtgggtgtggacggcggaggctgttaatccctttggtctgttggcgggaattgggtcacaattgggcacagggagcggaggttttgagatcttgagatcctcgccattgatttgagcaaagtgagactggccaggattggggagatcgctgcccctcgcccccatatcggaaacaaagtgaggcctcattgcctggaagcgatggaggaatccaattggctggaagtagccctctcccactgaccgggatccgctttcttcctgcagcgtgaagacacagcgcatctccccgctgtaggcttcctcccacagaacccgtttcgggcctcagagcgtctggtgagatgctgttgccgctgctgctgctgctacccatgtgctgggccgtggaggtcaagaggccccggggcgtctccctcaccagtgagtcctcctgttcaccctcccgccaggctggaggtgggaggggccaacattgggccttagggataggcatttacagccttttgactcagtttcccggtagtgctccgctggtggggatgggaggacagaggtggtatttggtggagaaggcgcttacctgccctgggctgagcttcctgtaccccgcagatcatcacttctacgatgagtccaagcctttcacctgcctggacggttcggccaccatcccatttgatcaggtcaacgatgactattgcgactgcaaagatggctctgacgagccaggtgagccttttctctgttcatccatcagatgtttattgaacactgctcagtgccaggccctgtctgtgtgaccaagatactacctctgctggctcccctttgagtgggcagaaacaagctcagaagtcagtggtcagtgttatggccccgggcagctggaggagcccagagtcgtcctcctcccaagcctcggggtcagagaaggctcctccaaggaggtgaggtttcagttgaatcccgaaggtgctgcagatggaggggtcaacacgggcaaacccctagaagtgggagacagggtggggccaagagcaatccagcaggagacagaggtgaagggagaccctggctttttgtttttgtgtgttttgaagagacagggtcttgctttgttgctgaggctggagtacagtggcatgatcgtagctcactgcagcctggaactcttgggctcaagtcatcctcctgccttggcctcccaaagtgctggggttacaggtgtgagccaccgtgcctggatgagaccgtgtctttggttttgtttttgttttgagacggagtcttgctctgtttcccaggctggagtgcagtggcgccatctcggctcactgcaagctccgcctcccgggttcacaccgttctcctgcctcagcctcctgagtagctgggactacaggcacccaccaccacgcccagctagtttttttttgtatttttagtagatacagggtttcactgtgttagccaggatggtctcgatctcgtcaccttgtgatccacccgcctcggcctcccaaagtgttgggattacaggcgtgagccaccgtacctggccttgttttgttttgtttttaatttttttttttgagatggagtttcactcttatcgcccaggctggagtgcagtggcatgatcttggctcactgcagtctccacctcccgggttcaagcgattctcctgcctcagcctcctgagtagctgggattacaggcacatgccaccacatccggctaatttttcgtatttttagtagagatggagtttcatcgtgttggccaggctggtctcaaactcatcacctcaggtgacccacccgcctcggcctcccaaagtgctgggattacaggtgtgagcccccgtgccaggtggagaccctgttttgaagggcctcagtgagaagaggcaggaggcggcactggagagctttatttcgagccctggctgtgcagtgtacaactctttccttcctttggtttcctttcctttcttgtgctgtgtgcagtgtgggtcaggggctcttatctgtggatggatgggacatgtctgtccctgagctgactccgaaaaccttccctcccttcttcctcacaggcacggctgcctgtcctaatggcagcttccactgcaccaacactggctataagcccctgtatatcccctccaaccgggtcaacgatggtgtttgtggtaagtgaagatgcaccaggattctggaaaggtggtagagggagggagggaggaggcactgccaggtctgatcttggcttctgcctctgccacagactgctgcgatggaacagacgagtacaacagcggcgtcatctgtgagaacacctgcaagtacgtgggtgacagtacccctcccatcaccccaccccaagactttgcctggctccacccagtgaatcgggcccactctctcttctgcttttctgtatcgggttctctgtctgtgccaggtgccttgtgaatcctaatccccacctttccctctagtctggaagcaggtaggattgtttcccgattcaacagatgggggaactcaagtttagaaagggaaatgacttccccagggtcacataggagatagcagagccggcacttggactctaaactttccattgtcacgctctgcagcaggtcctgaaaaccgaaacacccacaggcaggtaaagtatacaacggaaggaggccaggcgcggtggctcacacctgtaatcccagcactttgggaggctgaggcaggcggatcacgaggtcaggagatcgagaccatcctggctgacatggtgaaactccgtctcactaaaaatacaaaaaattagctgggtgtggtggcgggcgcctgtagtcccagctactcggtgggctgaggcaggtgagtggcgtgaacacgggaggcagaggttgcagtgagccgagatcgcaccactgcaatccagcctgggcaacagagtgagactccgtctcaaaaaaaaagcaaaaaaaaaaaaagcatacaacagaaggaggccaagtatgaggcaatacggaggggtggggattgtggcatctaggggaacagctgttctcaattcctgccagctgatccttttgtagttcataggcatgatgatttatttttatttatttatattttttgagacagggtctcactctgtcgcccaggctggagtgcagtggcgtgatcttggctcactgcaacctctgcccttcgggttcaagcaattctcacacctcagcctcccaagtagctgggaatacaggcgtacccccaccacgcctggctaacttttgtatttttggtagagatggtttcactatgttggccaggctggcctcgaacgcctgacctcaggtgatctgctcgcctcagcctcccaaagtgctaagccgccgcgcttggccacgatgattaggtttttatgcacgtgtgagagatacgcctcccttaaaccttgttgcgaccttggcgcattacctgtctgatatgaaaaaataagacccggctcatggtggctcctgcctgtaatcccagcattttgggaggctgaggcaggaagactgcttgagcccaggagtttgagaccagcctgggcaaaatagcgataccctatctctataaaaagtaaaaaaaaaaaattaaaaagtaaaaataaaaattggaaattataatttaaaaaattactggttgggcatgtggctcacacctgtaatcccagcactttgggaggctaaggcgagaggatcaccttaacccaggagtttgagaccagcctgggcaacacagtgagacccgtctcagaaaaatttttcttttctttttttttttttttttttttttttttgtgagacagagtctcactctgttgcccaggctggatggagtgcagtggcgcgatctcggctcactctaacctctgcctcccgggttcaagcgattcttctgccttagcctcctgagtagctgggactacaggcatccaccaccacacccggctaaaatttgtatttttagtagagacggtgtttcacaatattggccaggctggtctcgaactcctgacctcatgatccacctgccttggcctcccaaagtgcggggattacagatgtgagccaccatgcccggctgaaaatttgttaaaaaattagccgggtgtgttggtgcgtgtctgtagtcgcaggtactcaggaggctgaggcaggaagattgcttgggcctgggaagcagaggttgcagtgagctaaaaagtaaaaaaaaaacaaaaaaaacacaaagtcctatcagttgttggcagatggtgtaaaactctctggattccacatcttttaaatagaaggtggattgaacacaaccaacacacttctttttttttttgagacggagtctcactctgtcgcccaggctggagtgcagtggtgtgatctccgctcactgcaagctccgcttcccgagttcatgccattctcctgcctcagcctcccgagtagctgggactacaggcacctgccgctacacctggctaatttttttttttgtatttttagtagagatggggtttcaccgtgttagcccggatggtctcgatctcctgaccttgtgatctgcccgcctcggtctcccaaagtgctgggattacaggtgtgagccaccgcccctggcccacacttttttttgagttagagtctcgctctgttgcccaggctggagtgcagtggcatgatctttgcttaccccaacctccacatccgggttcaagtgattctcttgcctcagcctcccgtgtagctgggattacaccgtgtagctgggcgccaccacgcccagctaatttttgcattttcagtagagacagggtttcaccatcttggccaggctggtctcgaactcctgacctcaggtgatccgcccgccttggcctcccaaagtgctgggattacaggcatgagccaccacgcccagccaaccaacacacttagtaaccagattgtctttttgtctgggagtcatgatttctgttctgtcttctgtggtttttttatttgttttaattatgtgtaaagacagggtctttatatgttgcccaggctggttgcgaactcctgggctcaagtgatcctcctgccttggcctttcaaactgctgggattacaggcatgaaccactgcacccagctgatctcctgtctcttgagagttgatatctagctccacctcctggcactccctagtcccttccctgaccccaggggcttacagaacccactgttcctctttcaaggacaggaatgaaggatgctgatgttgagagaacctgggaggaaggcttgctctcatctttcccagcatggcttggtggggggccacagctggattgagctattttggaagaggcagacctggtggatcctaagtgccccactggtggtgcctgtgtgtctccgcaccgcagagagaagggccgtaaggagagagagtccctgcagcagatggccgaggtcacccgcgaagggttccgtctgaagaagatccttattgaggactggaagaaggcacgggaggagaagcaggtaaggaacccgcgggggctgccccagggtgatctgggccttgaggcctcatagtgtgggcttgcaaggctggggaggggtttgcccctgactgctgttctggggcaagtgactgcctttcggagctttgctttctcagttgtgtgctaggcgtttagtcattggctaagtataatagttcccgagggggaggctgtcagcttaggtgtttatcagggcctcgggcatcagactaaagcaggctggaagggcctctctgcctcctggggatgggagggttgcttctctgtaccccggatctgtggtgccattgcctgtaagatgggctgatgaccagatgactccccagttctgatgttagaaagataacgtcagccagtagcagctggattaattccatagggtgggtgctttggggtccctaggtgtgtgtctctccctgccttgcctgtgtactgggcaggaggctggaaaccgacctggatttgcctcaaggcattcattgctagtgggagggacagccagccagggctgctggacaaagggaaattcggggtagagacttcttgcccagttcctctccctctctgccttgggggcaggaggcaaggaaggcttcttggaggaggaggcctctatctcacatgaaatctgttgggtaatttggagttagccaggtagagtgttccaggctgaaggaacagcatgtttgaagaaccggaggcagaagagcgtttaggggtctgaatgttgtcagggcgactggatcctagtaagatagggatggggcaaatggggctggagaatcaggcaggggcctgattacctgggcccttgcgggctacattgaggcgtttgggcttctctccagagggctacagggaaccccagctcgggagagagacccagcttggtgtgtgttttggaacatctccctgctgccctgtggagtagaggcagggaggtagtagtcaatgaggaggaggcagaacagaggagagctggtctcttgccttctgcccacccagaaaaagctcattgagctacaggctgggaagaagtctctggaagaccaggtggagatgctgcggacagtgaaggaggaagctgagaagccagagagagaggccaaagagcagcaccagaagctgtgggaaggtatggcagaaatggccaaggactcaccttcagtcctgggtgggagcaggtctgggcctaggagtctcccgctcattatctgttgtcagtttcagcaggtttttgatcatgctgcccatcgccttgtgtgctttgaggttcgcttggattgtggcatatgtcaggagcctcctttttaaaaattgtttaaataatttgttttttgaaacagcgtctccctctgccacccgggctggagtacagtggcgtgatctcagctcactgcaacctctgcctcccaggttcaagcaattcttgtgcctcagcctcctgagtagctgagattacaggcacctgccaccacatttaactaattgttttgtatttttagtagagacggggtttcacaatgttggccaggctggtcctgaactcctgacctcaagtgatccacctgccttggccccccagagtgctgggattacaggcatgagccacctcgcccggccgcctacttccttttaacatcaatgtagattttgttatatgactttagcaggacttagttaatccagtgaccatttttcctatcaggtgtttggtatttgtcttcactaattgtaagagcttttttgtggctgggcatggtggctcacgcctgtaatcccagcagtttgggaggccgagacgggcagatcacctgaggtcaggagttcgagaccaccctggccaacatggtgaaacgccatctctactaaaagaaaaaattatggccgggcacagtggctcatgcctgtaatcccagcactttgggaggctgaggcaggcagatcacgaggtcaggagattgagaccatcttagccaacatggtgaaacccatctctactaaaaatacaaaaatcagctggacatggtggtgtgtgcctgtaatcccagctactcgggaggctaaggcaggagaattgcttgaaccaggaagttggaggttttcagtgagctgagattgcgcccctatattccagcctggcaacagagtgagactccgtctcaaaaaaaaaaaaaaaattagcctggcatggtggcatctgcctgtggtcccagctacttgggaggctgaggcaggagaatcgctggaacccgggagacagaggttgcagtgagctgagatctcgccactgcactccagcctgggtgacaaagcaatacttcatctaaaaaaaataataaagagctttttctatctggggtttggccctttgtctgcaactgaagatttttttttagtttatttatttttgagatggagtctcactctgtcgcctaggctgaagtgccaatggcccgatctctgctcactgcaacctctacctcctgggttcaagtgattctcctgcctaggcttcctgagtagctgggattacaggcacctgccaccacagccggctaatttttgtagttttagtagagacggggtttcaccgtgttggccaggctggtcttgaactcctgacctcaggtggcctgctttggcctcccaacgtgttgggattacaggcatgagccacggtgcccagctctgtctgcaactgaagatattatttcccttcttcatttgtttttggtgctagagcctggtgttttttggtaaggccacattgcatgtagaaagggaattcactgtctggctctgtctgcccctgaatctttgtcgtgttgcaagcttcctttcacttgggtctgggcaagctcaggcctgattttcctcaggatgtgttctcagtgtggagctgtggaatcagagggaagcgccatgttttgacccagattcccaaagggtggcggggctgagccagggctccgagggtagatggcctggattgggccccaggctacacctctcactggctaggtgattatgggcaggtcccttcacccacagaaaggtcagggacccctcaggccctcatctgtgagactcagaacagtgtcagccgggtctcctgggacatgcgggatgtcctggggtgacctaagactctctagaggaaataccagctgtttttattctgtttgtagaggaccaagctggagcttggtatacagtgggaactgaatcctggtatacagtaggaagttaatcattggagccgctgttgtggctgctttccgctctgcttaggttagagtagcgacagacaaaggagggacttttgggacagaggctcggtccccttctgtccggctggcccctcttcctgggagcagccctggggacccccaagatgcccccaggaccggtctccctccctgtatcctccccatctcccagcatccttggccatgaagtctcattcctgccagccctgccccgacatgcctctgccaggtcctaaacctaaagtctcagtggtcgctctcctctccccaaccccacctcccacctctgaccgtctgcgcactccatctgcgtctccccagaatctgcctctgctccgtgcttcttcctcagtccccagcctgggccagcccttgttatcacctggcttctgccctcgcccccacctctgtcccaacagtggcctgacagggctgccctctgccacctgggttcccacctccctgctccagccccaccagtggccctcctgcctctgcactccccaccttgtcccggtctcccccaacacaaccaggcttcaaccattcaccttgctcttcgtctgttctcccctggtaagggcagggacctttgtctcctccacagtcgtgtcctcagggtccagcatggggccaggcatatagtaggcgcttggtggcaaacgaccctgtggggtgcgggggctgatgggagccggtgggtgggcagggggtgacagaggtggcttctttacagagcagctggctgctgccaaggcccaacaggagcaggagctggcggctgatgccttcaaggagctggatgatgacatggacgggacgtgagtgtcccctagttggagctgcccacctttccgtgggcctgggtttccctccccgccaccctcgcctctagaaaccagccagatcctccttgggttcccccggcgtggggtccaggctgatcccaagccccgtgtgaccccgcctcttactcgtggatggccaggtccaggatgccctgggcgaggagatagggggaccaccctctccccaggagctgggcacagaccctcagcctcagggagtgtgtctaggcatctagtgatcggatggcttttcccagccccactacgctctggggaaagccagacctgggttcgaatcctggctgtgcctctgagcttgctgggttacctggtggagggtggacttttgggggctgagaggcacacggggagcctaggagatgtcaggtgccaaggagcagggggcttcagagggaccgaatgggcaagggtgggggtgggctttgctgggtgggggaccaaggcagatggcagcttcaatgtgccgggtcctggggtggaaggaggtgccacctgggtgagttggtagagaggtcatcggacatttgggggtccaggtatctcccagtcccaccccttactttgagctcctttggggtcatggagtcctgaggagggggcaggagggtggggaggcccctacaccttgaggtcctgaagcaagttccagggtggggccctgcagggaagaacaggtgggccacatggtgcccccaactgagagccactggggcctcacccctccagtctgcttctgccacgcccccgcagggtctcggtgactgagctgcagactcacccggagctggacacagatggggatggggcgttgtcagaagcggaagctcaggtacccccggctgccccttggttggggacttctagggagcattgccccagggtgacctcagggcacaggagggggaccaaggaaagctccttgctggcctgggatgcctcctctgggtgagctgggatggcagccactcagggccgcttcccgcctggcaggacccgggatggagccaggtcgcgctggagcccgtttccccgcacctgcccccactctacccgctgttgagcacccaatccccttcctcccccacccctgtcctgccctattcccctcctcccccacaccctcgtcccctgtctgtctcctttcctatcctcctccttccccgtggcccctggcttctggcctcccttctctgcccacccctgggtttctccctctccatctgcagcctgggccttggcctctcccttggagggcctggccctctctggtcctgggctctctcttcctccatctgtacgtccgtttgtccatctgcttctctctttctgtctcagtgcccccaaccactccagcccctggtctcctcctcccctcccacgggcctgtgctgccccctcctggccgcagtgcctcactggcgtggccctggcctggtcatcagggcccggggcccagccctcccgtgcctggcaccgcagcccgggtgccggggtggccgagatgggggacacgtggtggcctagatcttgacaccacccccaacacacacaggccctcctcagtggggacacacagacagacgccacctctttctacgaccgcgtctgggccgccatcagggacaagtaccggtccgaggtcagtggaggagaagggaggggacttggtcctcccaccacactgcccccaccccgcctcacaaaggagctgcctctggttctggcacctggccaccctggccagctgggtggccccagcaccccccaccgagaccccccgaccccagctgtcggtcctccctgcaggccccgcaggaggggcagagacaccgaggctgccccttgggctgtggtgtgagcctgagggtgtgggtggaccctgagtccacaacaccgaccgcactgctcacccgccaggcactgcccaccgaccttccagcaccttctgcccctgacttgacggagcccaaggaggagcagccgccagtgccctcgtcgcccacagaggaggaggaggaggaggaggaggaggaggaagaagaggctgaagaagaggaggaggaggaggattccgaggtgcagggggagcagcccaaggtccgtgtttgggggagaagtggagacagagagggtgggggaagggctactcactgaccctgcccctgccccaggaggccccaccgccactgtcacccccgcagccggccagccctgctgaggaagacaaaatgccgccctacgacgagcagacgcaggccttcatcgatggtgagggtgggcgggggccaggctcctcgggtgggcccagcgtttcctgccgtggtggcacaggtcgagggaagatcctgagcttagaccctgctctgactcggccagcacaagccccagtatcttggggagtccaggaagggggcctagggtaagccagtcccaccctcgccagccccaaggggcccttctgcctccccaagggccgcagcttgtttgtgtcactcctggccccactcgctcaggagctgggagcctgggcagcaagtcggggctgctctatagctggtgaggccctcaaggctgtcggggtgaagtccttggccagagcaaaatgagggtatgggagcacacagccacatccatggaaccccgttccccatcctcctggatggggttgaggacatctctgacctccaacccctctcccagctgcccaggaggcccgcaacaagttcgaggaggccgagcggtcgctgaaggacatggaggagtccatcaggtagcgggggctgaggagcggggacacctgtcccacagcgactgctccttgactcccaggggagctggtgatggggaatcactgaggcaaccacaggctgggcctggtccctgcagggagggtccctgggaggtggcagggaggacagcctgggcaccattgctcagccagaccctcctgtgtctgtcgtcctgggtcaggcactggcgtccccagctgccccttaaccgctccgcctccccttccaggaacctggagcaagagatttcttttgactttggccccaacggggagtttgcttacctgtacagccagtgctacgagctcaccaccaacgagtgcgtcccaggaatgcaggggcccccactggcagggtgggaggcgggtggccccggaagtggcaccggcagtttcctgatggttggggaaccatctgcgggtggggcccgagagtgctgccttccatattgagggggagcagaagccaggggccaggtttagggttggtcattggagttggaggtaccctgtgtgtggggactggaggaggcggtggggggtggctgtgggaggaggctggaatccctgcgttccccaacccatatgtcccggtcctccacagatacgtctaccgcctctgccccttcaagcttgtctcgcagaaacccaaactcgggggctctcccaccagccttgggtgagtggcttgggctggccccttccctctgcctcctcctggtgccccgacaccggcccagccctcagcaccctgtgtctctcacagcacctggggctcatggattggccccgaccacgacaagttcagtgccatgaagtatgagcaaggcacgggctgctggcagggccccaaccgctccaccaccgtgagtgcctgcaaggcaggggagctggggcggggagacccaggcctggcccagccgaaccctctcgagcacccgtctgcccatccccaggtgcgcctcctgtgcgggaaagagaccatggtgaccagcaccacagagcccagtcgctgcgagtacctcatggagctgatgacgccagccgcctgcccggagccaccgcctgaagcacccaccgaagacgaccatgacgagctctagctggatgggcgcagaggtgggcggggaggtggagtctcgtcggcctgccccagcaaggggaggcggcgggccctgaggaagatggacccacatggccactctatcaacctgtgtccccatgttccctgcttttttgttttgtttttttgaggtggagtctcactctttggcccaggctggagtgcagtgatgcgacctcagctgactgcaacctctacctcccgggttcaaacaattgtcttgtctcagcctcccaagtagctgggattacaggtgtgcaccaccatgcctggctaatttttagtagagatggggtttcaccatgttggcctggatggtctcgaactcctgacctcagatgatccacctgccttggcctcccaaagtgctgggattacaggcatgagccaccacacccggccatctcctgcctttttttttttggatggagtttcactcttgttgccgaggctggaatgtggaatgcaatggcgcgatctcggctcactgcaacctccacctcctgggtgcaagcaattctcctgcctcagcctcctgagtaattgggactacaggcgccgccaccacgcctggctaatttttttgtatttttagtagagatggggtttccctgtgttaaccaggttggtctcgatctcctgacctcgtgatccgccctcctcagcctcccaaagtgctgggattacaggcttgagctaccatgtctggccatcccctgctttttaaaaaaagatttttttacttttgaaactaaataggccaggcgtcgtggctcacatctgtaatcccagcactttgggaggctgaggtgggcggatcacttgaggtcaggaggttgagaccagcctgaccaacatggtgtaaaaccccatctctactaaaaatacaaaaaaattagctgggtgtggtggtaggtgcctgtagttccagctgctcaagaggctgaagcacaagaatcacttgaacccaggaggtagaggttggagtgagccaagatcatgctactgcactctccagcctgggctacagagtgagactctcaaaaaaaaaaaataataataataagagaaaatagacaaggtctccaggctggtcaactcctggcctcaaatgatcctcccacctcagcctcccaagcagccgggactacaggcaaacatcaccatgtccagctgtccccagctttctaatctggtctttctcttgccccagaacctcaagaaggcatgaagccagcccctgcagtgccgtccacccgcccctctgggcctgcctgtggctctgttgccctcctctgtggcggcaggacctttgtggggcttcgtgccctgctctggggcccaggcggggctggtccacattcccaggccccaacagccttcaaagatgggtaaaggagcttgccctccctgggccccccaccttggtgactcgccccaccacccccagccctgtccctgccacccctcctagtggggactagtgaatgacttgacctgtgacctcaatacaataaatgtgatcccccacccaaacttgtctgtgtctgcctcgctttgctggggtgtggaccggggtgtgggcaggggttgagcgcaggggacgcagctttctgcagatcccacccgggcctcccccaccatctggggatcactcctgaagataccaggtggatggaccctggaccatttctgtcttgagcatccatccgggcccgtgtcccaccttccctgggtctcatctgtgctctgtggaggccaagggttccctcccggggccaaagcccctgctgcagacagacccaggcccagagaaggacgggggcctgggcgctactacacaggctgctcctgcgtgctccccgcgcagcggtgcagagatcacccaaggccttaagattctgaacttttattttctggcatgaaaagtacaaataattaaacaattccatgtaaaagtctgttaccgcggccaggcctgtgatcccggtaataaatagtctaaacgcaacgcgaagtgttcttgttgggttttttttttttttttgtcttttgttttgtctttttttttttttttttttttacagttttttatcacctccaacatggactctgtcgtgatttgaaaccttccgaataaataacaggatgaagggaggggtggaggggctgagccccctcccccctggcctggcccctgccccccagggacgtggaagccccaagtccccctcgcctgggagccccggcctggccccctgcggggaggggctggcctccagggagggggcctggctgggctgagttttgtgttttagaaaaagaagtcccctcccagtcttgggggtggcaggggcctaggcctcggtggggggggggtgtgtggggaggtgccccctctctggagcctggccccccccagggtgggggacaaacccagcccttattgctcggacgccctgctgcaagcttcccacgcggacgtgcgtgttcccgaatgcagagggcggaggggagagagccccaagagacagcaggggagaggggtccctgccctgctgcaggggagaggagagagggcagggaggacttaaaaccacgagaataaataggttcgtgtatcaagaacaagctagggatttcaccagctaaataggactgaaaaaattctcaagacaagagcaaaaagaatcccattggtgacctggacgtcgctggccgtggggactgtcccgcagagcacacgcccccgcgtgccactcggctaccattactgttattaataattattattactttaatgattccacttccccttttataaataaattaggcataaccatgtctcggcaaaacttaaagaaacaaagagaacattgtcgttcctttaacttgcaaaccggatgaagtaacagaaatatacacggatgtccttacagggcaacgaggagaataaatagttaacatagcaataagttaaaactacaagaagctaaattcagcaaaaaagtacaagaaagttaactggtgccagtttatgtcttttttttttttccttttttttttttaaatctcttctgtgtgttttctttttttgttgcttttttttcctcttctgtttgtgtttttttgtcgcttttttgatttttttcttttttgttccttgcagcagaagctccacagacgtttaataacaacaccgggaggggtgggggagagagagctggacagtcagatgggggcgccatagccagacaccaaacgtggggacaccgggggaaggcaacttaactatagctaaagtcgggggttttgcaattctcagttccgatggggccgctgagtggggtggggagcggtgcgagggctcccaggggctccggcctgtggcttctgttggaattttttttttttaaagaaagaaaactagggcgatgcaatgtccagacagaagccgggggccggggctcgagatcgggggctgtgtccactgcaatctggaaagacgaaaaacccaacaaaccgaaaggggataggtaggtgacaagtggacgggaaaggagtgtggggctgggcctttgggcccatccaccccaccctgggcctggcggggagtgccggggtcttgctgccggggaggcccagtcctggtgggggaggctcagggctgggcctctccctcagctgtgtgggccaaggcctcggcccagggggaggctgagccccggggacaggggtgtcctttggcctcaagtgttgtgggggggggggctgcctccagcccaccgtgacgccaaggtggaacgaggtatcgtgtgtctcaatgcatgtgcgctgcgtgtgcacgcctgtgttcgtgggcgccaaggagaccgctgggggtccaggagagatctctgcagagaacctgggggccagggcgagggggccgagagggtgagggagcgtctggggcagggtctggggtgggacctcctgcctgggcctgtgggatgctatgggcatatgtctgcgtgttcctgggtggtgtttgtgtttctccgtgacctggtgtccaaatttgatgtccaaatatctatcgctacattcacgtgtgcacgtggacaggtggatggattcgtgtgcccacatctgtggtctgtgtccacatggacgtagccccagcttctgtctctttctgtctatccctgtccacgtgtctgagtttggccaaccagtcccttaacgtgtctggggcatgtcgctgtgtccgtctgcgtctgtccgtgtgtccccgtggtgtgactgtctgcgtggttgtttctctgtgtggccccgtgggctgctagcccctaagccctgctccctgggccccccccacccccgccccagttggtaaacataacctgccaaaatattttctttttttttttttgtctttttttgtgtttttttttttcaagttcaagaatccccagtaaaaattctccacgaggtctttttccctttttacaaaaatagagtttttcttcccctcccacccccctttttttttcattttgtttctgcttccagccccactgcctgctcccccgcattccaccagggggcactgggccgggggtgcccacacccctcctcacggttcgcttttttggggatttttaaacctgttcctcctaccccaggccccacctaggtgctggggaggcctgggcaagggggtctgggagggcaccccctggagccccccaagccatcccatcgggggtggtcgagggtgggggtgggggcacatctctgcattctttttagccgaaaaaagaaacaaaaaccttcaccatgaaccaaaccaagacgagagagtgaacagcccagcctggggtgggggcaggaggatggggcgggggatccccgggcacccccccaattccctgcagaccctcccaccccagagtgctcaccctgtggcttccgcagggacgtggggccctcgcgtcgtccgtggggctgcctgtgctgtctctcttgggccccttctctctctctctctctctttctctctctctctctctgctgcccggggagggggtgggagggcaggcggggtgggctcacgccttgtgctgtttgctggtcttgaaggagacctgcagcacgcgctcgcccaggcgatagccgttcaggctggcgatggccatggccgcctcgtcatagttggtcatggtcacgaagccgaaacccttgcacttgttggtggtgaaatcacggatgaccttgacgttggtgactgccccaaaaggcccgaacagctgccacagcacgctctcgtctgcctccggtgacaggttgtacacgaagatgcaccagccggcgcccgccgcgccccccgacaggcccacgcccgccaggccgctcataccatcgatggcgatcggcgagaacctggcgatgagcgacaggggactactttgggggtcacgcgggctctgccctgaccccccgcatgcttctgaccccgttgtgacccttcacacctttatgacccctgactgtgccatgaccttggaatggtgtgacccctgcaatgcaatttttttttttagagacacggtctcgctctgtcacccaggctggagtgcagtggtgcaatcatggctcactgcagctttgacctcctgggctcaagcaaacctcccgcctcagcctcctgagcagctgggactgtaggcaggcgccctcacacccagctaattttttttatgatttgtggtgacacagtctcactatgttgcttaggctggtctcgaactctcaggctcaagcaatcctcctgccttggcttcccaagtagctgggactacaggtgcaccactatgccccactaatttttttttttttttttctgagacggggtcttgctctgttgcccaggctggagtgcagtgggatgatctcagctcactgcaacctctgcctcctaggttcaagcgattgtcctgcctcagcctcccgagtagcacctgccaccacgcccagctaattttgtatttttaatagagatggggtttctccatgttgatcaggctggtctcgaactcccgacctcaggtgatccgcccgcttcgacctcccaaagtgctgggattacaggcatgagccaccgcacccagccatgccccgctaatttttaaaaatttttgtagaggtggggtctcgctgcgttagccaggctggtctcgaactcctgggctcaagcaatcctaccaccttggagttccaaagtgctgaaattacaggtgtgagccactgcacccggctttccttttcaaatcatatatttattatcatcaacttcatcttccctgcaagagtttgttccagcccctgaacaacacctagtaagcacttgggaggtgtctgttgaatgaattaatgaaaggacagaattggctccactcacattcctcactggcaatcccgcccttggattaaacccctcagctgggaagggaggacccaagggcctgaaccattcaatcctgaccacgaggaacaaactactcgctccttctggccctctttgcacaggcttttcccactgctaggaactccctttccactctgcctttgtgtggatgttgcctcagatgggactggggggtctctgctgctgggtctccgtcaccccttcttttttttttttctttttgagacggaatctcactctgtcgcccaggctggagtgcagtggcacgatctcagctcactgcaacctccgcctcctgggttcaagcagttctctgcctcagcctcccgagtagctgggattacaggcgcctgccaccgtgcccagctaaatttttgtatttttagtagagatggggtttcaccatcttggccaggctggtcttggactcctgacctcgtgatccgcctgcctcggcttcccaaagtgctgggattacaggcgtgagccaccgcgcccggcctctgttaccccttctacttcacagctttcatcaccattcatttctctgtctcctcccccactagactcagactgagatcttcttttacattttttaattatttttttttttttgagatggagtttcgctcttgttgcccaggctggagtgcagtggcacgatttcagctcactgcaacctcctccttccatgttcaagcgattctcctgcttcagcctcctgagtagctgggattacaggcatgagacaccgcgcccagccacattttttaatttttggagataaggtctcgctctgtcacccaggctggagtgcagtggcaccatcatagttcactgcagcctccaactcctaggctcaagcgatcctcccgcctcagcctcctgagtagcctgaactacaggcatgcaccaccgtatcaggctaatccttaaaaaaaaattgtagagaaggatctcactatgttgcccaggctgatcttgaactcctggcctcaagtgctccttgcccctcagcctcccgaaacactgggagcacaggcgagaaccaccacgtctggctttgatgtcacatctctcaatggccatgctactccaagacccaggcaaacaaggctaagcctgcagccctgggggtgagctggggaggggtgcatcaggggcatggatggtgaggggtggggacagtggggcggggtcactgttacctcttgacgccgtaggccatgttgagcaaattgtccagcctgtggaggcagaggtggtggtcagaggtggcttccagtcacgcccccctgctgtgacaccgtcggcctgccctccccacccccacccaacaggcctgcagcagagccctgcccccgcctgcctgctccccgcccgcccggctagacactgcctggcacggaaccgtggtcactcaggcaccgcctctcgcctgccccaccgctgtccagcctgcactggcctcctcatccatcctccccctcctggctggcgggtcccctctgggcccaggcgctgggatccctggggaaagataactcctaacaaaggcgacagtaactaccacagccaacattctcgcagcacttgagggggtgggtaacttgccccggccacccgggggcccacaaggggcttccattgtctccccttggagtggctatgagcttggactccaggtcctgggtttgagtctctgctctgtttgggccaggcaaaccccaacacctctctgtgcctcagggtccccgtccataaaacagggacaacacaagctctgttctcatcgggttgcagaaaaataagggtgtctagcacacagcaaagactcatgaaatatttggtgttattacagatgggaaactgaggcacagagctacagccacgtgcccaaaagagaaaggggccaccagagctggaacccagatgacgccaaaatcttttaacaccaagaatgccaatcgtcgcggccagcacacattgagggcctgctgtatatgagtggctggccttggcacctgacagataggctccttggctcccatgtgtgcgcaccctcccggcatccctcccttcggcaggaatggggttcagggagggttgcaagcttgggggcacccggcctggggccatctggctggcagggggctcaccggaaacgctgggtctgatggtgtagggggcctgcgtagcgccgggcggatgactggtagaggtgggtgagcagcgcctgccccgtcttctgacttgggttgttcgcgaacttgactgtgatgggctcagctgcgcccagcggcttctgcccattcagtcctttgatagcctcttcggcctcaatcctcttgtcaaagcggatgaatcccacaccccgagagacacctgccagggggcagggatgtccatcacgacgaccctgtcccctcctgtgtaaccccacttctcccttccctgcttcatgccctggcatcttggtcggtttccccacgttggtcccacctgactgcctttgcccagcgcccccgccaggtgcaccctccctgactgcctgacctgtgacctggtccaccaggatgcgggacgtgatgatgcggccgtactgggagaagagctgctccatctctttctggctcatggtcttggggagcccgctgacgtacaggttagcatcccggatggatgctgaactgggtctggcataggacacctgggtgagggggtcagatggacaggggtgaggcagagacccatttcacagatggagagagtgaggccatgtctaaaccatcacggagttagcagaagtgacccatccgtcactcaataagtatctctagagttgtcaccgtggggtggggctgagtcagatatgggagaggggacatggcagtggctgtaacaacttggactgcctgtatagagtgatggggacctgccacctagggaggacatgtctccctggggtgacatgtgaccccaaagggatccttgaatagccggctcacatcactatcacatgcttgacagtccatcaacaaacattgacctttttttttttttaaagacaggatctcacttttttacccaggctggaatgcaatggtgtgatctcagctcactacagcctcgacctcttgggctcaagcaatcctaccgcctaagccccgcaagtagctgagactacaggcgcccaccaccacgcctgaccagcattttttttttcttttttttttttttgagatggagtgttgctctgtcgccaggctggagtgcaatggcgacatctcggctcattgcaacctctgcttaccgggttcaagcaattctcctgcctcagcctcctgactagctgggattacaggcgcccaccaccacgcctagctaattttttttttatttttttgtatttttagtagagacgggtttcaccatgttggccaggatggtcttgacctcttgaccttgtgatccgctcatctcggcctcccaaagtgctgggattacaggcgtgagccaccgcgccttacctaatttttataattttagcagagacagggtttcatcatgttggtcaggctggtctcgagctcctgatctcatgatccgcccgcctccgcctcccaaagtgctgggattacaggtgtgagccacctcccccggcctcagctaatctttaaatttttttttttgtagaaacaggatctcactgtgttacctaggctggtattgaacttctggcctcaagcagttctcccatctcggcctcccaaaatactgggattataggtgtgagccaccatgcctggcctatttttattttattgaaagacggagtcttgctgtgttgcccaggctaaatgcagttattattcacaggtgcaatcatactgcactgcagcctccaactcctggactcaagccatcctcccacctcagcctcccaagtagctgggactacaggcatgcaccaccacacccagccactcttcccactcctatagagagtggacctaagacactggccccttctcttcccagctacactgggccccccagggacactcaggtctttagtcatcagctcccaaatgtccccagtctgcacccctggtggcaactgcatccaggtgccccacatgggggtgtcaagggcacttcatacacagcacgggtgcctcctgctcccgcccgcctccaatctgccccaactcactaatggcaactctgtcctcctaagtgctcatgtccccaggttcaggttgttctcgacacctgttcttcacatgcacatccaacccactctaaatcctgtaggctctaccttcctccttatccagaatccacacacttcaccccactgccactgtcccaccctggcccagccttcactactgatcacctggaccagtgcagcagcctccaccctggccccccctgctcccatcccccactgtctgtcccccctacggcagccagagggcgcctgtgaacacctgagccaggtcgcatcccccctctgctcagaaccctctatggctcccaccttcctcagcagaaaagccaaagtcctttccttggaccgcaaaaccctgcacattcttccccatgacatccttgccctcatctccccctacttcctgccccaattactgtgttccagcaacttgaacttcccccatttttcccaaacacaccaggcatgtctcagcctcagggccctggcattgcctgttctctctgcctggaatgctcttcctcctcttctttctttgggtctcagttgaaacatcctccctgtcctctctcatctaaatttgtcctccccccaccacccctattactctttctcaaagcacttctcctaactaggaattagacacattttagcactgttatctgaatcacattattaattatagtccaacccaacaacgaaactctctgcaggtgtttaaaaaaatggtgggtcaggtgcagtggctcatggctgtaatcccagtgctctggaagttcaaggcaggaggatcaagggagcccaggagtttgagaccagcctggacaatacagcaagactcacccccgtcctccaccgccacaacctctacaaaaaaaaaaaaaaaaaaaattagctgggtgtggtggtgcacacctgtggtcccagctactcgggagactgaggctggaggatcacttgaacccaggagttaaaggctgcagtgagctatgatcacaccactgcactccagcctgggctacagagcaagaccctgtctctaaaaaaaaaaagagaaaaagatggacatatatatttatttcccagaaacggtggtgactggtgagtattgtaaaatgggggacagaaaagtctatttacaaagcagggaatattgtgtgaccttgtttcattgtgtgtttatcaatgtcctggaagcatggtagggaagtccacctctcaaatgctcagtgggtgacctgtcaccagggactggggaagaggctggggcgtggtcatcagcaattctcccccttatgtctgctgtatctatttttcctccctccctccctccctccctcccttccttccttccttcattccttccttctttccttccactctccctccctccctctttcctccctccctccttcccttccttcctttcctctttctttttcttgttaagtgaggtttttgtttgtgggtttgttttgagatggggtcttgctgtgttgcccaggctggagtacagtgatgcaatcatggttcaccacagccttgacccccccgggctccagcaatcctcccaccctcggcctcccaaagtgctgggactacaggtgtgagcctttgtgcccagcctctattttctgtttcttctaattaacctcttgatagataggggtcattgtcttctggcttttgtttgggacagtgagttgagacagtgagttgtgagagtgtatgcctccattagaaataactaattaaagctgggcgcggtggcgcacgcctgtaatcccagcattttgcgaggctgaggcaggcggatcacaaggtcaggagatcaagaccatcctagctaacatggtgaaaccccatctctactaaaaatacaaaaaattagccaggcgtggtggcgggtgcctgtaatcccagctactcgggaggctgaggcaggagaatggcgtaaacccaggaggcggagcttgcagtgagccgagatcgcgccactgcactccagcctgggcaacagagcgagactccgtctcaaaaaaaaaaaaaaaaaagaaataactagtttaaaaatgaacaaaatagataaagcagtttgagagtgaatggggggcagggtctgattaatataattttgtgcacctggggttctccagaaaaaaaaatcacatcagccattgtcatgtccataataatgatttttaaaatcacagccaggccaggcacggtggctcacgcctgtaatcccagcactttgggaggccgaggtgggcagatcacttgaggtcaggagtaggagaccaccctggccaacatggtgaaaccccgtctctactaaaaatgcaaaaattagccgggcgtggtggcgggcgcctgtaatcccagctactcaggaggctgaggcaggagaatcacttgaacctgagaggcggaattgcagtgagccgagagcgcaccactgtaatccggcctgggtaacagagcaagattccatctcagaaaaataaataaattaattaagaaataaatcatgtccatgctgggcacggtggctcacgcctgtaatcccagcactttgggaggcttgaggggggtggatgatctgaggttgggagttcgagaccagcctgaccaacatgctgaaaccccgtctctactaaaaaaaatacaaagattagccgtgcatggtggctggcgcctgtagtcccagctacacgggaggctgaggcaggagaattgcttgaacctgggaggcagaggttgcagtgagccgagatcgcgctactgcattccagcctgggtgacagagtgagactccgtctcaaaaaaaaaaaaaaaaaagaaagaaagaaatcatgtcaatgtatttgacagttttctcttctttttttctctcccatggggctaggagctgtgagggtacttgctgatgaatcagatttgggttgagggattagatttgggggtaagatcctgggtggatattggaggtccaacaccgtctgagacacagaggaggttttcacaggccttttccatccctccatgacatgggtttcccaagggcaaggatggaccaaactccacccacaccccaccctgggatggggcctggcccgcggcaggcagctggagatattttgggcagctgccatagcgcccagtcctgactgaccgcgcaacaccgtcacacaggcaaaaacacccagggacagacagaaggccatgcagtgccgccccgctgcacagcctcagagatgaaaccagccagagggtgacacaggccactgtcacattctcagcaacgttcaggagggagtctcagagaattacagtgaaggtcgtagaaccacatacccatcacagcgcagcacaaacacacgatatcacactcaatccctcagagcagggcacaggtagacacacccacacaacatcgcggtgacacacaaacatcctgccagagccagacgcatccctgaggccccatcaggtcacagccggagtcacagtgtcacatgcacctgtcaaataataagcacgtcatcctgggccgggtgcggtggctcacacttgtaatcccagcactttgggaggctgaggtgggtggatcacgaggtcaggagttcaagaccatcctgaccaacatggagaaaccctgtctttactaaaaatacaaaattagccaggtgtggtggcgggtgcctgtaatcccagctactcgggaggctgaggcaggagaatcgcttgagcctgggaggcggaggttgcagtgggccgagatcgcgccattgcaatccagcctgggcaagagagggagactctgtctcaaaaaaaaccccaaaaaatcaaaaaaccaaaaaaaaaaaaccttatcctacagacacatagggatatacccgaagtcttaaatacacagatgcacttgacagcagcctctctctccctccctctctctccctctctctctctctgtctctctctgtctctctctctctctctctctctctctctatatatatatatatattttttttttttttagacagggtcttgctctgttgccgaggctggagtgcagtggtgaaacatgactcactgtagcctcgccgcctcagcttaagtgatcctccccactcagcctcccaagtagttgggactacaggtgcaagatgccacgcccagctaatttaaattttttttttttaggaacagggttttgtcacgttgcccaggttggtctcaaactctcgggctcaagtgatcctcctgcctcggcctcccaaagtgctgggattataggcgtgggccactgtgcctggccacagccactcgcacactgtgtcccacaaccattgtgtcacagccagagccacagtgagtcacgggacacctggatcataaacactgtatctcacaactcaagatgacacacacacaccccacacacacatacacacacacatacaccacacacaccacacacacaccacacacaccacacatacacatacatgacacacacatacacacatcacacacacaccccccacacacatacaccacacacaccacacacacacacatcacacacacaccacacacatacaccacacacacatcacacacaccacacacatacaccacacacaccacacacacaccacacacacatgcaccacacacaccacacacaaaccagacacacacatacacaacacacacaccacacacacatacacacatacacacaccacacacaccacaaacacacaccacacacacaccacacatatacacacaccacacacaccacacacacgcaccagacacacacatacaccacacacacaccacacaccacacacacatacatacacatacacacaccacacacacaccacacacatacacacatacacacatcccacacaccccacacagacacacacacaccacacacacatacacatacaccacacacatacacaccacacacatacacatacacaccacacacatacacataccacacacacatacacgtaatacacctacacgccacacacatacacacacaccacacacatacacaccgcacaccacacacatacacaccgcacacatacaccacacacatacacacacacacaccacacacacacacaccacacacatacacacatgcacacacaccacacacacatgcgtacacacacacatgcgtacacatatacatacacacatacacacacacatacacgctgcatctcaatgtcactggggtctggggtcctcatgccctgaggcttctgggtctcgttggccatgaagggacccattgggtcacaacttcactcccccaccccaatccccaaccccccacatcaggaaagggaagagattcctgcacctctgttcccatgttgaactgggggccagatgggccacccccccgaccctggcttcctccagggtccgggagcagatttgcagggcggagcccaaacacccccaggcgaacccagagaggggggtttccatgacgattcccccccagggaacctgggcttgtagggtcccagctgcagctgctgagaagggaggtcctgggggaggggcgttgcacaaagatgggggatgggccgccccaatcccgccctcccagaccctaattaggctccagatggcagatgggcccccacccccatttccatgacaaaagcagggaggggactgctcacaggaccctggtcactctgccttacagggcctggctgactccctgagcctccagagatcgtggagccagtactgtccccattgacaggtgaggaaactgaggtttagagagggaaagccattgcccccaccccagctaggaagtcttggaggggagatttgagcccctctggggatgagtcctgaaaggcagtggacatggatgcatgggggcgggtaggtggcagtagggggttggggacagtcagttggggtgggcggtcatgggggattggagaaggaggcaccaaccttgatggtcttcgtctgtaatttgaggccgttgagggtgttgatggctttgtctgcatcattggggtcagaatagttcacaaacccgtagccaaggctctgccctgtgggcagaaccagaatgatgaccttcccacccagccttgacacctgccagtgtcccacctcaggcctgagagactgtcccctccccaccaagtttccaccttcctgtttccagatgacaccttcgatgctagagtcccacctgcctccatcgctcctgagaccttcacctagggggtatacccatctccccatcagacctcacatccctagaccacctcctgcctcgattacccccgagacacctcagcaagggtcccacctgcccccatcacctctgtatttctgaggctaccacctctgttcctccccgcaactccagcagccacacctgtgatcttgtcccgaaccaacttgcaggactcgatgtcgccaatgctgccgaagagactcttgaactcatcctgggtcatgttctggggcaggtagttgacgatgaggttggtcttgctgtcgtcagtggctccatttgtaccaaggagtggcccgttgggcagggccgggccggccgggcccccccccacctgagactccatggcccccagtatctgctggagataacaggtcgcatccgctcaccgcccagtccccacaccaggggcctgcggcaatgagtggcttggtggtgatgaattagccatgtcttataggggcttcgtcatggggaggggtcactttattattctaatgatgggaataatgatgggattccatatattggaataagcattggggggaaacaaagcacctgatgtttttactgcaagaaatcccttatatgactactatatacgcaaacagaggcctaaaatcaacctgtgcatttacaaaataaaaaacgctttcacaccggaaacgctttcacgtcgggcgcagtggctcacgcccctaatctcagcactttgggaagctgaggcgggcggatcacctgaggtcgggagttcgagaccagccagaccaacatggagaaactccatctctactaaaaatacaaaattagccgggcgtggtggcgcatgcctgtaatcccagctactcgggaggctgaggcaggagaattgcttgaacccgggaggcggaggttgtggtgagccgagattgcgccattgcactccagcctgggcaacaggagtgaaattccatcttaaaaataaaataaaataaatgctttcgctctcagaaaagtaaatctaacagtagctttctttgtttttgttgttgttgtttgttagttggttgctctgtcacccagactggagtgcagtggtgcgatctcggcttgctgcaacctccgcctcttgggttcaagcgattctcctgcctcagcctccagagtagctgggattacaggtgcatgccactatgcacagctaatttttatatttttagtagagatggggtttcggcacgttggccaggctggtctcgaactcctgacctcaggtaatccacccacctccgcctcccaatgtgctgggattacaggcgtgaaccaccgcgtctggccccatttttagtagcttttattttagaaaaagggtctcgctctgtcacccaggctggagtgcagtggtgccatgaagtctgactgcatcctcgaccttccaggctcaagcaatcctcccacctcagcctcccaagtagctggaacaataggcgcatgccaccatgtctggttaattttaaaattatttgtagagatggggtctcactatgtggcccaggccggtctcaaactcttgggctctggtgatcctcccactttggcctcccaaagtgctgggattacaggtgtgagctactatgcctggcccttttagtagctttgaagcctcataagcccttccctaaacatatttatttgcctcctcccaccaaaggtaattcctatcccaaatgtgctaattatgtcttttgcttcatgcataagtttcttactagtcatttacctgccttcatctccccttgccacccccagttttcccactgagctattttgttcttttgcttttattgtataacataaaacaccttcaaataatgacaattttattttttcatcttcagtctatacctgttatctatttttcttgtcatttcaggggctacagtgtgatagtggcttctttattcctgattttttttttttttttttaaagacagagtctccctctgtcacccaggctggggtgcaatggcacgatcttggctcactgccacctctgcctcccaggttcaagcaattctcctgcctcagccttccaagtagctgagactacaggtttccaccaccacgcccgccaaatttttttgtgtgtttttagtagagacggggtttcactatgttggccaggctggccaggctggtcttgaaatgctgacctcgtgatctgcctgcttcagcctgccaaagtgctgggattacaggcatgagccaccacgcccggccctttattcctgctgttaagggagatgctttaaacattttgcagccaaacatgatctttgctatgggtttttttctagatggcctttatcgggttaagaacattttcttttattcctagatcctaagacttttttaaaaaaggatgttgaattttattgactttttttttacatcaattgaaaccattttttagctttaattaattaatttttgagacaaggtctcgctctgccacccaggctgaagtgcagtagggcaatcttggttcactgcaacctctgccttccaggctccagcaatcctcccacgtcagcctccccagtacttggggctacaggtatgcgcctccaagcctggctactttttttttctttgtatttttagtagagacggggttttggcatattgcccaggctggtctcgaactcctgggctcaagcaatcctcctgctttggcctcccatagtgttggaattacaggcgtgagccaccgcacacagcccattttttagctttaatacattaatgtcatgaattacgttaattgattttcttttttttgcgcgggaggggggacggagtttcgctcttgttgcccaggctggagtgcaatggcgcgatcttggctccccccaaactccgcctctcaggttcaagcgattctcctgccttagcctcctgagtagctggaagtataggcatgcgccaccatgcccggctaattttgtatttttagtagaggcggggtttctccatgttggtcacactggtctcgaactcttgacctcaggtgatccacccgcctcagcctcccaaagtgctgggattacaggcgtgagccaccgtgcccagccgttaattgattttctaatattaaatcaatcttgatgggataaaccaaacttggtcatgcatattgcagttttgtttatatacattgcttgatttaatttgctgaattttttggtggtttagcatttttttacatatatgttgaggaggacatgctgtttatttaattcacacaaagactctaaaatggtagaagttggctgggtacagtgacttacgcctgtaattccagcactttgggaggccaaggtggacggattgcttgagctcaagagctcgagaccagcctgggcaacatggcgaaaccctgtctctactaaaaatttaaaaactagctgaatgtgatgttgtgtgcctgtagcaaagatacttgggaggctgaggtgggaagatcacctgaggtcgggaggtcaaggatgcagtaaaccataatcacaccactgcactcctgcctgggcgaccgagtgagaccctgtctcaaaaataaataaataaagctgggggcagtggctcaagcctgtaatcccagcagtttgggaggctgaggcaggaggatcactggaggtcaggagttcaagactagcctggccaatatggtgaaaccccgcctctactaaaaataccacaattagccaggtgtggtggcacacgcctgtaatcccagctactcgggaggctgaggcacaagaattgcttgaacccgggaagtggaggctgcagtgagctgagctcgtgccattgcactccaggctgggtgacagagcgagaccccatctaaaaataatagtaataaaataaataaataaggccgggcatggtggctcacgcccataatcctagcactttgggaggccgaggcaggcagatcacctgaggtcgggagttcgagaccagcccgaccaacatggagaaaccccgtttgctactagaaatacaaaaaaaaaaaaaaattagccgggcgtggtggcgcatgtctgtaatcccagctactcaggaggctgaggcaggagaatcgcttgaacctgggaggcgggggttgcggtagctgagatcccaccattgcactccagcctgggcaacaagagcgaaactccatctcaaaataaaacaaaataattaattattaaatggtataagttaactttgctatgatagatggagaatctgaggcttaaagatgttaaggaacgtgctgaagtcacatagcctatctgctctggcattggaaatgaaatgaagaccctcggaatgtgaagaccactctacaattttcttttctttttttagagacaggatcttgctttgttacccaggctggagtgcagtgttgtgattgtagttcactgcagcctcaaactcctgggttcaagcattcttcctgcctcagtctcccaagtagctaggactacaggtgggcgccaccatgcctggctaatttttaaaaatttttttgggctagacgcagtggctcatgcctgtaatcccagcactttgggaggccgaggtgggcggatcacgaggtcagagtttgagaccagcctggccaatatggtgaaatcccgtctctactaaaaatacaaaaattagccgggcatggtggtgtgcgcctgtaatctcagctactcaggaggctgaggcaggagaaacgcttgaaccagggaggtggaggttgcagtgagctgagattacatcattgcattccagcctgagcaacagagtgagactccatctcaaaaaaaaaaatttttttttttgagccaggcgcagtggctcatgcctgtaatcccagcactttgggaggccgaggcgggtggatcatgagttcaggagttcgagaccagcctgacccacgtggtgaaaccccatctctactaaaaatacaaaaattagtggggcgtggtggcacacgcctgtaatcccagctactcaggaggctgaggcaggagaattccttgaacctgggagacggagtttgcagtgagctgagatcgcgccattgcactccagcctgggcgacagagagagactctgtctcaaaaaaaaaaaattttttttttgtagagatggggtgtcactatgtcgcccaggctggtctcaaactcacagcctcaagcaatcctcatgcctcagcctcccaaagtgttgggattacaggcatgagccactgaacctggcccaattttcttactgtaacagtcaaccaggctggtactggctctgacaactcactatgcgtctttggatatgcctgctagggcctctgtttcactttgctgaaaattcagaacaattggcaagggctatatgaagggctatgtagaggagaattttaaagccacttcagaaatcagcagcaaacagtgctgggatttgactgaccttatctgtcagggacataagaaggtcaagtagccagcatttccttacatcttcttcagtggcacagttggcacataggtttaccctcacttgaaaacctgaactgggccaggcatggtgggtcacggctgtaatcccagccagcactttgggaggctgaggcaggtggatcatctgaggtcaggagtttgagaccagcctggctaacatagcgaaactgtctgtactaaaattacaaaattagccaggtgtggtagtggacgcctgtaatcccagctactcaggaagctgaggcaggagaagtgcttgaacccaggaggcggaggttgcagtgagccaagatcgcaccactgcactccagcctgggcgagagcaagactccgtctcaaaaacaaacacacatactgattggtagtgtcttcctagaggaatgaattaagaagaattcagaaaccacatttaggcaaggcgtgctggctcatgcctataatcccagtactttgggaggccgaggtgggaggactggttgagctcaggagttcaagcccagcctgggcaacacagtgagatcttgtctctacaagaaatttaaaaattagctagtcatggtggcttgcacctgtggtcccaggtactcaggatggtgagacaggaggatcacttgagcccaggaggtggaggttgcagtgagccatgatggcaccactgtactccagcctgggcaacatagtgagacactgtataacaaaaaagaaaaagaagaagaagaagaaggagagggagagggagaacgagaaggagaaggaaaaggagaaggagaagaagaagccaggcgtggtggctcacgcctgtaatctcagcactttgggagaccaagggggggtggatcgccagaggtcaggagtttgagaccatcctgaccaaacatggtgaaaccccgtctctactaaaaatacaaaaattagccaggtggggtggtgggcacctgtaatcccagctatttgggaggctgaggcaggagaatcacttgaatccgggaggtggagattgcagtgagccgagatcacaccattgcactccagcctgggtgacagagtgagactctgtctcaaaaagaaaagaaaagaggcagggcgcggtggctcacacctgtaatcccagcactttgggaggccgaggcgtgtggatcacgagatcaggagatcgagaccatcctggctaacacggcgaaactccgtctttactaaaaatacaaaaaattagccgggcatggtggcgggcgcctgtagtcccagctactccggaggctgaggcaggggaatggtgtgaacccaggagacggagcttgcaatgagccgagatcgcaccactgcactccagcctgggcgacagagcgagactccctctcaaaaaaagaaaagagaaaagaaaagaaaaagaaaaagaaatcacatacagttttcagtaggaaagatcactgtgattgattagcaatgtctgctgtggccacacaactagaaacagccagcaggtacatattatctcaaccatccctgactcaagctccaatatcttaattgttcccaaatattggctactactgtgtgccaggcactgtgcaaagcactctacatgcaagttttctgttcttattcacaacaatcctaaaaagagaatttttcctcccccacttcacccccacttaatacatgaggaaactgagatattttaaaaattgccaaagatcatgcagcatataaatggtggaacagggatttgcatatgagtttttctgatccagagtgtgcatttccaacttccactgccaaccaagaacagtgccagctctaacatttcccagctgtgtgtcctcagatagactacttagtgcttctgagcctctgctccattttgctgcaaactccaaattatagtcacactggcctggggtagtagctaaagccatatgctgtaaagcatctggaattggttagttacgtctgtcatgggcatgatcatgggaattaaaagcaggcttgtcacatccatcatccgtacctcataatacacctacattatttattattattattagagacggggtctcgctctgtcacccagactggggtgcagtggtatgatcatgactcatttcagtctaaacctccggggctgaagtgattcttacacctcagcctcctgagaagctgggactacaggcatgtgccaccatgcctggctaatttttttaattttttgtagagatgggttcttgctatgttaccaggctgatctcaaactcctggcctcaagtgatcctcccaccttagtttcccaaagtgctaaggattcagttgtagccaggcacggttgctcacgtctgtaatcccagcactttgggaggccgaggcaggcagatcacgaggtcaggagttccagaccagccttgccaacatggtgaaaccctgtctctactaaaaatacaaaaaaattagccaggcgtagtggtgggtgcctctaattccagctactagggaggctgaggcagaattgcttgggaagcagaggttgcagtgagttgagactgtgccattgcactccagcattgcacaccagcctgggtgacagagtgagactccgtctcaaaaaaaaaaagaattcagttgtgagccaccatgcctggcctattattcttttatttaaagatggggtctctctatgttgtccagcctggagtgcagttattattcacaggtgcaatcgtagtgcactgcagcctccaactcctggactcaagcaatcctctcatctcagcctctcaagtagctatgactacaggcatgtgccattgcatggggcaatactgctattttattttattttatttttttgagacggagtcttgctttgtcgcccaggctggagtgcagtggcgcgatctcagctcactgcaactccgcctcctgggttcacaccattctcctgcctcagcctctggagtagctgggactacaggcacccaccaccacgcctggctaattttttgtatttttagtagagatggggtttcaccgttagccaggatggtctcgatctcctgatctcgtgatccactgcctcggcctcccaaagtgctgggattacaggcatgagccaccgcacccggcctaatactgctattttaatgagcattccactacactgagcatctactgtgtgccaggcactgtgggaaatactttgaggcatattttcagttactctcccaacaatcttaaaagactgagaacacattctccattttacaggtgacaaaagtgaattcagagacgtatgaatagggaaattcatttcagtcctggatctgtttgcagagctgtttttcatcattatggccaatgccttgtctcgctatgttgcccaggctgaccctgaactctcaggctcaagtgattctctcacctcagcctccccagtagctaggactacaagtgcaattcatcatgcccagctaattttttattttttgtagagatgggatcttgctatgttgcccaggctgttctcaaactcctggtctcaagggatcctcctgcctctgccttccaaagtgttgggagtacaggcatgagtcactgcacctggtcaccatctactttttttttttttttttttgagacagagtcttgctgtgtcacccaggctgcagtgtagtggcacgatcttggctcactgcaacctccacctcccaagttcaagcaattctcctgcctcagcctccgaagtagctgggaccacaggcgcgcaccaccatgcacagtgaattttttgtatttttagtagagacaccgttttgccatgttagccaggctgatctccaactcctgacctcagatgacctgcctgccttggcctcccaaagtgctggtattacaggcataagccaccacgcctggcccatttactcttgtaaaacagatggcacagaaggtcagctcccctgcatctccaattggctgagttgctcctgggagggctgcctggaggactactctgaagacacatccggcctcaaaaggaatatgcattgggttgattagcaatgtctgcaaggcacccgcagtgatgcagtaacatgcactgcacagctctgcattcccgtctcctaacattaatacttaactgatcgcgtaaccatgtattgaggtgcctgttgtgtgccaggaaaaattcctcatgtgaaacttccaggtggttctcctgccgttgaacatgatgagattcctttctccatttaatacacgaggaaagagagtctcaatgaagggacagggtgactggggaggctgagacaggaagatcatttaagcctaggagtttgagagcagcctgggcaacacagtgagatcttgtttccaccaaaaaatttccaaaaaaattagctgagtgtggtggtgcatgcctgtagtcccagctacttgggaggctgaggtgagaggatcaacttgagcccagaagtttgaggatgcagggagcgtgatcatgccactacactccagcctaggcgagagggtgagaccctgactcttaagggaaaaaaaaaaaaatgaaggaataggaacagagttgcataggcggcaaatggtgaaacaagaattcaggctgggcttggtggctcaggcctgcaatcccaatactttgggaggcctaggcgggaggatcacctgaggtcaggagttcgagaccagcctggccaacacagcgaactctcatctctactaaaaatacaaaaattagccaggcatggtggtgggcacctgtaatctcaactactcgagaggctgaggcaggagaatcacttgaacctgggaggcggagcttgcagtgagccgagatttcaccactgcactctagcctgggcgacagagaaagactctgtctcaaaaattagaaaaataaaataaaaaataaaaaaaaaagaattcagttccagggtttggactttagagcccactcccctaacgaaaagaccagtaatataataacaaaataataacagcaaagcgaagctgagtacctgctctctgccgtgccctgggcatcatgacatttaaacccactccatcggttgagtctattaattcaattcaacaaatatttactgagggctacacatgtcagactccaccctcctcatgctgtcctctgatagttaggtcacctctctatgcctttctgttcttccttaaggaaggtatggcacagaggtctcacatgtatggagctggattctgaatttgcatcctggttcattaagagttttgtggggtttttcttttccttgtttatttttgagacagggtcttgctctgttgcccagtctagagtgtagtggtacgatcatggctcactgaagccttaacctccttctgcctcaacctcccaagtagctgggactataggcttgcaccacccagccggctaatttttctctttttctgtagagatgaggttttgccatgttgcccaggctgcgatcctcctgccttagcctcccaaagtgctgagattacaggtgtgagctccaccatgactggccctggagatggattctgaatttgcatttaagctcattgaggtaagagttctatgttgagttgctgatatttgctataagagcccagtgagcagttggcagtacacaagccactgcttctggacatgctagatccctatttttttttttttttttttgagatggagtcttgctctcttgcccagcctggagtgcaatggcatgatcttggctcagtgaaacctctgcctcccgggttcaggcaattcttccacctcagccaggtagctgggaccacaggtgtgcaccatcgcgccccgctaactttttatatttgtagtagagacggtgtttcaccatattggccaggctggtctcgaactcctgacctcatgtgatccacccaccttgggctcccaaagtgctgagattacaggcatgagccaccgtgctagatcctatttttgaactccactgagcatgtgcaaagttttcattgacctcccacaaccacagtgaatggtatgaagggtctcctccatttctcagatggggacactgagggttagtcacagggacctatgacttgtccagggtgacaggaggaggtggaggggatggtgtcaacatctgactcctgatccgatgaccctagagccgaaagagttactggctgcccccctcccatggtgtccccaacctgagcagagtgaagaggtgactgggtggttcagacccaggttcttgaggcctagcctgctaatctggccaccacccgttctccctcccatttgtgccagagcttagcgggaccagtatctcgtttcctctgtggctgagccggctgagctgataatggggatcagattgatggaagccacacccgccctgccccagcctgcagtaagtgcacagcctgggatggtggctacatgggcatcaaagggacttcggcgactggccccagacagagatgggggggtggcaaagtcagggaggaggagggcagataaaagatggagggttagggaagcttcccattctctccagtgcttcttctaagtctcccccgacttttggtttctctctccctctttcttcctctgtttccctctcttctccactgtcctgccctctctctgaaccgttctgtgtccctggcctcatcactctctcttcctcttttccaccatcgcacatacatctgacgtatgggttttgcagtgaacacacctgaggccacttttttcttaaaacctcctgtgtctgacccccacggcccccagctgcggcccctggccccagtcacagtgacagatgcctggataccggcgacaatagggcattgagtggctatgcatggtgaggctgggctaccacgtggtgctgactgagcctcctacttctgggcccttcttcaatgcagggtcctcctggtcttaatttgtcacctctcttcctcccagcctgtccccatgatacatctctgccccagggctcgctcactggagaacctaggtcctcaaggcccttgtgtgacctctgaccacaccctctttccctttgtgcattagtttcctttttcaaatgagagaaccgatcagaggacgcttaggagatgctggactgttgcgggagttctgaggtcctcaggaggccacactccagttcccagacctgggtgaacagcacgaggcccagagagggaaaggaacggcctgaggtcacacagcaggtgagccaggcctccgggacctcatttctcagagccaggtgggcgggtcccagggtccaggaggggagaggcttaggcatggagggagcgccaatcatgcccccacccccagtgctagccacgactcgaaaaaggggcccggaaagagacacaatgcacagagacacacacgcagagacggagagataggaagagtggaagagggaggcccaggcgccgggaccagacaaaggacgcgcggcggcgcggggagcggagtcgcgcggcaggggcgggggtggagccggggtggggctataactggccagccccgcccccgggatacgcccgggctgccgagtgggaatccgagggctcgggcgaggccgggcccccggggccctgggggcggggcctagatgggcgtgcccgggcgtggccaggcagggcgtggcagggcgggaggggctgcgcgctcgggagctgaccagctccgtggctgctgaaagcaccgagcgcggggctagcggtgcgggcgagcaggcgggcgggccgcgctcaaggtcacctcgcggcccagagccttggcgaggtggggagcctggacctggcctaagggggctgtctcggcctcccaccccatctcccggggggcggagacccgggagcccagaggtgcccccccaacccgcgggccctcctctcccctccccctccccgcagcccgaggcgcccgcgcgaggctgcggcccgcgaagaagcgccgagaaacaaagggacgcggcagcagcggcggcgggcccgcggggcctccgggcgcgccccctcctctcccctccccgcttgccgcaaggtcgacgggctcgaggacgagacgcccgcctcccgggtgcggccgaggcccggggcgcgcgatccgacgccacccgctttcccagggctctcggggacgctttgtcgctttggcttggcccagcaccagtgatcgggccctgcgtttgcctgggcggcctgcggggtctgggcctggatggaggaagcatccttagccgccgcggcccctcccccatcaggcctgctggagagggggcaatcccgcctccagggcggcgtcggacgcctcccgaatcgcagtcagtctccctaaggccctctcagaccaagctctaagcgccctcagcactctgggcgcggccctgcccactctcaggccccgaggcttggtcctacccccccaacccgggcctagctaggcctggtcctaccccccccgccgcacccgcccaatctccgcggagcctgggcccaactcctccccgtcccgattccctttcggcgacaggggaatacctacagtgaccattcttgtgtgcccggcgggcgcggtccgtgttgaggggggctccgggggtggtgcactcctaggggggcgcccgatgctcacgctggggtcccgcccgggcggcctctggtgcggccgctgcagatgtggcgatgaaggcggcggctccctcgagggccagggacgggcccgaacccggggatgcgcgcgcggatggccgggccccggggtggcctgcgggcggcaggggatggaaagagggagcgggcgcggggttgaggacgccccctgcgcggccccgcggggcccggggaggttgcgcttcccgacagagatcgcggcgctctgcctttcgccgccgcccctcggtcggtcctgtccggtcccgtgtgttcaagtcctctcccctcgcccaccctccctccctccctccggcccgcgctgcgcgctccgcgctctggaccgcgccgccgccgcccccagccctttatagcagcagctgccagcgccggcgtcgctcattggctgcggcgaccgagctccgcctcctcgcggctcccgacggcgcggcaggtggaagtgagcgcgcactggtcgggactctgaatcccccaaaagcgcatcctaggtgctcgggttgccagatttgggccctccttccctcgaggcccttgcttcctaccctggcaccccttcttgggctggctttcgggccaggagacgggctcccctcctccgtccagctcctagagctggaggagccaacagagcgaggaggtattagtggcctgaatatgcgaccttccagaggtgttgtccactgagggaactggacaggggatcaggaaccaatattttagtaggcagaggcctgggtccccagatttggaggcaccagtgtagaccacctcaagaccacgggggagggtggctactgtggccctagtcttctgcagaaggagactgggacgctgttggttttgagtgagctggatccttctagggttcaaaaggtaaggactggcactccccagtgcaaggaaactccgcactgctccgaagggggtgaaaaggtttggggctcagtgttctggacaatcatcgctggagccatgcagctctgggaaaccacggatccttcttggaccccacagaactggggtgggtggatctgccacataaatgtcctggctttctaggctcgtgattggtcctcctgactgtggagtcatgctcgctctctgctagggggaacctggcctctctctaaggcgttgggggtggcgcagcctcctttggtgcgcgggcgccggtgcatgtttacgtcggggcgcgggaactagcacacactggggcggggtcgccagggcgtgaggcttcagcaccacagacagcaatccgacagtccggtcgagggcgctgccggcgaggtagcccagaccccctaactggagagcggcagtccccacccaatcctcgttcctgcacgccctttaggctccagactgtcagagagcgccaccagcgaggagagcctaatttgcccaatcaggggcggcccttgagataaccagttactggaagatgccctagagatcgagccaatgggagtgcgcgcaccaggggatgctgccacgcctggaaagggcaggccaatcgcagtggcccgcgcaataggggcggtggcggtgcagatccccgggtggcccctcttgggctcgccggggcgacctggctgcgggcgctaggggccccaagcgatggtctgttccccaccccgtgttcctcccggtttccgtcatcggaaactgagctaggaggggggctgctcctgggcgcgcggaccccgctgcggttcccatggaaacctgccggctccggcagtgcggggagagtggaggggacctgcctcgcggggggagggagctcgcgggggcggccccagcggccggactcgctcatccttgccgattcttctgtccccggctggggtagccccccggtccgcagcaggaactgaggcatagctggggccccgcctcatcccccgaactggtgaggaaccggcggggccaatctgcgcgtggcgccacagggctcccccgggcacgtgcctgagctcgcggctgcggtccccagggtcacgtggctgcggccaccagggcctacgcgcctcgcacgccacctagcggccgcgcctcgctccccgcccctctctctagcggcccgcaggaggcggcggcctcagcatcctcctccgggaaatggggccagggcagccgccgccaactccccttccccccgcggcttcctgttttaggaacacgccgagctagttctacctcggggttttggcactggttgttcctctggcctgagaatttcctcccccagctttcttctgggatagatctttgtcattctggtctatgcgcaaatgccacctcctcagaggccctccctgaccaccgacctaaacagcatccccggaaaacaacgcatcactctctcttttgcatggcgcttgtcgctagctgcaaatgtttctcattttaggggtttactgaacacctccccatctcatcccggagctcactgagggtgggagatgggtgccccataaaacaggaggaagtggaaattagggtcctgagttccgggagatgcccagagaccccagacccccaagcctcaccccatcctgtgggagcaggggctgtgcgaggctgctgggcccaggggcatccctcgttccctgcctcgcttaggaagggatcaagtaggctggagacagagaggggcctggcaccccaaatcattcaggcctaggggaagggcatctcctttctcgctctttaatctcactctgctctcttgacacagttccagcaatgcagccccaggcaccagctccgagaaggatgcggtggggcggggtggggaacctgcccagggggcccagctctggggcggggcgggggcgcctccttccggcccgcggtccgggcggccctcgcagctgtccaggccccggcaagcccgggcgtggtgtccgagcggacgaataaataggggcggtcagtggtcaggtgggtcaggtgggcttgtgatccgggtggcttttgagcgtgtggaacttgacgctgtccagcttctcgaagcgcttcccgcagcgatcgcacgtgaagttgtactgcacctccgcagtgtgcttcttcatgtgccagttgagcgacgcgcgctgccggcactggtagccacagatctcgcacctgccgggagcccgtggcgggacggggcggggtcagagtgggcggggcggggcggggccctacaaggccgagcgcaggtggaaccgggcccagacactgcgttggggcgaagccgcccctgggacctgctgggatcccctcccacccaatcctctagcggcacggggcggcctgtcactcactgcaggggggtctcgccggtgtgggtgcgccgatgtacctccaggtggttcttcctcttgaaggacttgccgcaggtctcgcaggtgaattcacggacacctgggggcggtggggaccgaggctgaggacggtgggctatggggtgtctctgatgtgctgcagactctgatgctagaaggagcatcaggctgtctccttggatctcccaggactgcaggtgcaggccgaccaaaccctacgtccttcccgtgcatttgcccacagacgccatcaagcagaactgagatcgaacttgggtccctgagaggcatagggtgcacactaccaagccaacatgggtctgaatttgtcttgtgtgtgtgtatatatatattttgcgacggagtttcgctcttgttgcccaggctggagtgcaatggcccgatctcggcttaccgcaaccacaaccttggtctcgcgggttcaagcgattcttctgcctcagcctcctgagtagctgggattacaggcatgtgccaccaaccatgcccagctaattttgtatttttagtagagacggggtttctctatgttggtcaggctggtctcgaactcctgacctcaggtgatctgcccacctcagcctcccaaagggctgggattaccaccacgcccggccttgtccctgatatttgaactttgggtgatttcgcaaaatgaaaacaaaaacaaaaacaaaaaaaacttctgcccagcacggtggctcacacctataatcccagcacttagggaggccaaggtgggcagatcgcctgagatcaggagttggagacaagcctggctaacatggcgaaaccctgtccctactaaaaaaaaaaaattagctggcatggtggtgagcgcctgtaatcccagatacttgggaggctggggcagaagaattgcttgaacccgggaggcagaggctgcagtgagccaagatcggattccagcccgggcaacagagtgagactctgttgcaaaaaataaccacacacacattaaaaaaaaccaaaaaaaacaaaaaaaacccccaaacttctgacctcctgtgatatcagaagctctggccctcagggcatgccctatcgctggacacaggcaccatggctctccactatgtccccagcccatgcagaagacctgcatctctgccacaagtggaaacagaagcccagtcccaagccagctgctcctctttgcccagctctccttcctgctgctgcttgggtgggcactggtctagcctgtggccccaggtgctgctataggttccaatctggaagagcagtggcggtgtcagctgctccctaagtctcgcatgagacctgctcttgggatcatggggcatggggtcgcggggataggagggaagatggccagccccacccaattcctgtgattgattggtaatagttcctgtcgctgtggctcacatagctacagcttactgaggacagggaggaggctcctaggggtgtagtcctgtgcccggagacccagcactgggctttgacccgccagctctggcccaggctcccaggcccatgtccctgtgtcccccgctcatgctgccagctggcccagggcctgacctgaatggatgatcatgtgccgccgcaggtggttggataaatagaacttcttgccacagccaggatgagggcacactttggtctttcctttccgatgcacaagattgacgtggttctggagacgagacaggcagaagtgggtcccataggcccacagaaggggctctgggaggtggggagagatgagggcagctggaaggcaggctggggctggcctccccaggaggagggaagaggggtacccttgcccagctcagagattcccaggggcacaactggggtcaaagggtagctttattttttttattttttgagatggagtcttgctctgtcgcccaggctggagtgcagtggtgttctctcagctcactgcaagctccacccccccgggttcacaccattctcctgccacagcctcctgagtagctgggagtacaggcgcccgccaccacgcccggctgctattatttttttctgtattttttagtacagacagggtttcaccgtgttaaccaggatggtctcgatctcctgacctcgtgatccgcccacctcggcctcccaaagtgctgggattacaggtgtgagccaccgcacctggccaagggcagctttattgaacacctactatatgccaggctctggactggggtatctgtcaactctgtgaagggcccagctgttagcccaattaatcgatggggaaactgaggttcaaggctctgtggtttggccaaggtctcacaggtggccagtggcaggactgggactggatttgagggctatcagcctctgtgggcctggaacaggcagccccaattgattcattcctttgttccttcactctttaacttactagaacaaccctggctccagcttgcaggcctggcttgcactaagtgcttaatacatgctcaatcaatgcatggcatggcacaaaggcctgttgttgcatcctcccatgccaggtcctggggtgtgacaagtccctgtctttgccttcagggacacctcgtcaaatttcaaggggcaaactagaggtaggacatcctggtggtgccatggcctgggccttgtgggcctggcccaggctgctccgggtggcggcctcacctggaagctgctgagggccacgtagacttggctgcagccctcgtatgggcagtggaacatctcgagcaggccgtcagcatccatcacccgcgaccgcttgctccgccgcctcctggaggggaaggggccatgacatcggggctcccgcaccaggcaggctgggggcctgcgggccgcttctagccctcgccctcacccttgcccgccccggcacccacttctcaggctccttggggatttcatagatgatggctgacatgtcgctgccgtccagctcctccccgtccgcctctgcctcaggctctgcgctctcaggcaccgttgttgccagctccggggctactggctcctccttctcctccttctttagcaagcacaggtcctccttctctacagggtggacacagggtggtgtccgcaggggacgaaggctgccgaggtgcccacttcgagggccattcctcgcccggcccctcccaggcccaaccacccctggccagaggccacgacaggtcccccagacctttcttggtctcgatgcctgctactgcggtggcgtccatggtgctaggctggctaccctcgggctctgtctgggtgtaggctgccacaccctccatcatggcacagggcacctcctcgcccagtccactgccggggacaccgctgcctgctgccatgttgaggtgaatgccctcggccgtgagagcgtcgtaaccagggcccgcaatgatgatcacctgtgagccgggcaccatgcctggcatggggcagctggccaccacctcacccagggcctcctggggcacgttctcaaagagggcgctggggcccgcacccacttgcacaggcaccggcacgcacaccactgtctccagggcttcaggcccattgcctgctgggttggagcacagcggggtaccctgctcggccaggctttccacgtggtggacgtcaaagggaatgtgcacgccctcctgagtgatgagcccgctgctgcccaccgggctggtgggcgtcgctgccgctgccgctgccgcagccttgaccggctggccctcaggagactcctcagagtcagaggcagagccagagctggatgagtcagagctgccagccaccagcccattgcccactgtggggacagaagaaagggagtggttatgatagctgcagccactggtatttgtttatttagtttttattttattttatttatttatttatttatttttttgagacagagtctcactctgtcacccaggctggagtgcagtggtgcgatctcagctcactgcaaccttggcatccccggttccagtgattctcctgcctcaggctcccgagtagctgggactacaggtgtgcgccaccacacctggctttttttttttttcctgagatggagtctcactctgtcacccaggctggagtgcagtggcgcgatctctgctcactacaagctctgcctcccaggttcatgccattctcccacctcagcctcccgagtagctgggactacaggcatgtgccgccatgcccggctaatgttttgtatttttaatagagataggggttcaccaggatggtctcgatctcctgacctcgtgatccacccacctctgcctcccaaagtgctgggattacaggtgtgagccaccgcgcctggcccacacccggctaatttttgtatttttagtagagacggggtttcatcatgttggccaggctggtctcaaactcctgacctcaagtcatctgcccgcctcagcctcccaaagtgttagaatgacagtcatgagccaccgtgcctggctgaatttttcttttcttttctttttttttttgagatggagtctcgctctgtcacacaggctggagtgcagtggcgcaatattggctcactgcaagctccgcttcccaggttcacaccattctcctgcctcagcctcccgagtagctgggactacaggcaaccgccaccacgcccagctaatttttgtatttttagtagagatggagtttcactgtgttagccaggatggtctcgatctcctgaccttatgatccgcccacctcggcctccgaaagtgctgggattacaggcatgagccaccgcatccggcctgagtttttcttttttttttttgagacagagtttcgttctgtcacccaggctggagtgcaatggtgcaatcttggctcactgtaacctctgcctcctgggttcaagcgattctcctgcctcagcctcctgagtagctgggattacaggcgtgcaccaccacacctggctaatttgtgtgtttttagtagagatgaggttttgccatgttggccaggctagcctcaaactcctgaccttgggtgatccatccacctcggctccccaaagtgctagaattatagtcatgagccaccacatctggcccgattttgtttttgttttgagatggagtctccctctgtcacccaggctggagtgcagtggtgcgatccgggctcactgcaacctctacctcccaggttcaagcaactcttgtgcctcagcctcctgagtaaatgggattacaggtgcatgcaaccacacctggctaatttttgtatttttagtagagacgggattccccattttggccaggctgatctcgaacttctgacctcaggtgatctgcccgcccgggcctcccaaagtgctggaattacagacatgaggcacctcgtgtggccctgattttcccaagtagagatcaggtcttgttatgctacccaggctgtggccttgaactcctgggctccagtgatcctcccacctcagcctcccaaagtgctgggattacaggcgggagccaccatgcccggccagcagttggtatttgttgagggctcttcaggggctagacactgtgaccctctcactgcttaaaacagcagtcacttctcaatccccactgtccctaactgttccaagatgactgacccagctgaccacccctactccaggggacactctcctctcttagcccccagacccacgctgtggtatcctgggcccttcctggtggctccttccaagtttatttggttcttgcaggcctggaaggcttggcctggggcctctcctcagcgctcaccttacccccaggcttgcccaggctaatggggttaaaggccaccctccgattctcgatgccaactgaatgtccaataattcaatccaatctgacattatcttcccggagtgggcgtcaaatcctccaagttaaaggctcagtcccacaagaccgccggacttcagatgtcagctgcaagtcctgggctaccctgtatgtctgaccaatgggctctaaatggggggtttccatgaccccatcctcaggtttgataatttgttagaacaactcacagaactcagaaaatggctctacctacaattacagctttattacaaaggattcaactcagcgacagccaaagggaagagatgcacagggcaagatacgggggtatggtatgggcttccatgccctctccgggggtaccaccgtcccagcatctcaatctggaactgttcaccaatctgggactgttcaagagggtttttgttgttctgttgttgttgttgtttgtttttttgagacagagccttgctctgttgtgtaagctgtagtgaagtggcacaatctcggctcactgcaacctccgcctcccaggtttaaaaaattctcctgcctcagcctcctgagtagctgggactacaggcacacgccaccatgtcaggctaatttttttttttgtatttttagtagagatgggttttcatcatgttggtcaggctggtctggaactcctgacctcaggtgatctgcccgccttggcctcccaaagtgctgggattacaggtgtgagccaccgcgactggccaagtatgtattcttattactacaaccatccatggcctggtgattccatctgcagcttctgcctacacctccatgtcgagctccagattcttccatctcattggccccctaagagtgtctcacaggcatctcaaactcagatctgcaacactgggctctgtatcttcccttctacaaagcctgcactgctcacgggtgtccctgactcagcggaaggcagctcagtctctccagtggctcaggccaaagtcctggggctcttgttgacttctctctctctcacacccacttccaatctgtcagcaaaacctgttggtgctgcatccaaaatacatccacccgcagcctgaacgcttctcccacttcccctgcagatgctagttgcggccccaccggccccctgccagggccagtgcagtcccttcttttgggtccccggctcctaagaacctactctttacctcctgtgaaagaagcaggccagctactcactaaatccctctcttcctggcaccagcaccgactacatttcccagcatctcttgcaggtaggtgtggccatgtggctgagtcccagccaatggaatgcaagtggacaggtgctcccaaggttgagtctccacttttctccccaccagtaagccaggacccacaaggaggctggagccataggaaggaaagaacctgggtccagggatgaaaggcagtctgcaggatggaagcaccaggctttgtatgtgggaaacaaaccactgtgccaggtcacgagagctggagtgcgtctgtttcaggaggtgttccatcacctcctgtcctcgcctcctctcctaatgtccttggagacactagataggttcctgcctcaaggcctttgcacctgccattccctcggcttgaatcctctttttttttttgagatggagtctcgctctgtcgcccaggctggagtgcagtggcacgatcttggctcactgcaagctctgcctcccaggttcacaccattctcctgcctcagcctcccaagtagctgggactacaggtgccgccaccacgcccagctaatttttagtagagacagggtttcaccgtgttagccaggatggtctcgatctcctgacctcatgatccgcccacctcggcctcccaaagtgctgggattacagacgtgagccaccgcacccggccggcttgaatcctcttctgtctgacacctgagagggctcctccctcccctccatcagatccttcattaaaggtattttttcagggggaatttcctgaccattctgtctcaaatagttcctttttccctcctttattttttcccaaagcacataccaccttacagtgcactctatattttattttatttttgagatggagttttgctcgttacccaggctggagtgcaatggtgcagtctcggctcactgcaacctccaccttccaagttcaagtgattctcctgcctcagtctcctgagtagctgggattacaggcacaccccaccatgccccgccaatttttatatttttagtggagacaatgtttcaccatattggacaggctgcgaactcctgacctcaagtgatccactcaccttagcctcccaaagtgctgggattacaggcgtgagccaccacgcccagcctgtattttaattaatttatttttttgagacagtgtctccctctgtcacctaggctggaatgcactggcacagtcatagctcactgcagcctcgagctcctaggttcaagcgatcctcctgcttcggcctcctaaagcactgggagaggtgcaccaccatgcccagctaactttttcatttttttgctagagatggggtctcactatgttgcccaggctgttctctaagccgtggcctcaagcaatcctaacttggcttcccaaagcactgggattacaggcttgagccactgtgcccagcctgcactctatatttttattggtttatcctgcttacaatccgcttcccctctagaatgtaaactccgtaaggttgcggggtcccggtgcagagcccccagtgccgagaaggctgtgtggtgcacagtgagggctcgttccaataaatgaatcaatctctgctccctagtcttggctcactgcagcctctgcctcccgggttcaagtgattctgatgcttctgcctgccaagtagctggaagtacaggcacacaccaccacacctggctaattttttgtatttttagtagagaccgggttttgccatgttgcccaggctggtctcgaacttctagcctcaagtgatccacctgccttggcctcccaaagtgctgggctggcattacaggtgtgagccactgtacccggccctcgggagtgtttttttttttttctagacagagtcttgctctgttgcccaggctggaatgcagtggtgcgatcttggctcactgcaacctccgcctcctgggtttcagtgattctcctgcctcagcctcccaagtagctaggattacaggcatgcgccaccatgcccagctcatttttgtatttttagtagagatggggtttcaccatgttggccaggctggtcttgagctcctggtctcaagtgatccacctgcctcggcctcccaaagtgctgggattacaggtgtgagccaccgtgcccagcctttgttttgggtctttaatgagtaaatatgtataagggtttaggacagtaggagattaaaagtatgtaccctgtaagtttcctattattatctcagtgccattcagggcagtgagatgcccactgttgatggacctggggtggcagcagggttggggataaggaggatcagcccctctttctggataatttccccttgtcctgtattctgcagggtgggcaaactctctggcaccatccagaaggagggcgcagtgtcctaatgagtggagggaagggccagagcacgcgtctgggtccacctgactgcagcacctgctaagtttggctgaccccagacttctcctcaggtaatgacagcaccaacagaaatagccatgggcaaggcccggtggcatatgcctgtaatcccagcactttgggaggccaaggcaggaggattactagatcccaggagtttgagaccagcctgggcaacacagtgagatcccatctctacaaaaaatttaaaaatcagctggctgtggtggtgtgtgcctgtgttcccagctactcaggaggccagggtgggaggatcacttgagcccaggaattggaggctgaagtgagctatgatggcaccactgcactccagcctgggcaaccgtgagaccctgtcttaaaaaaaataaataaaaataaaaagccaggtatggtggctcacaccagtaatcccagcacttagggaggccgaggcaggaggatcacttgaggctgggagttcgagaccagcctggccaaagtggtgaaaacccacgtctactaaaaatacaaaaattagctgggcatggtggctcacgcctgtaatcccagctactagggaggctgaggtgagagaattgcttcaacctgggaggcagaggttgcagtgagccaagatcgcaccactgcactccagcttgggtgacagagacagaatctgtctcaaaaagataacataacataacataacataacataacataacataacataacataacataaaacataacataacataacataacataaggccgggtgcagtggctcacgcctgtaatcccagaactttggaaggccgaggtgggtggatcaactgaggtcaggagttcaagaccagccggccaacatggtgaaacccagtgtctactaaaaatacaaaaattagccaggtgtggtggcagatgcctgtaatcccagctactagggaggctgaggaaggagaatggctggaacctgaggcttggcttgcagtgagccgagatcgcgccattgcactccagcctgggcgacaagagcgagaccctgtctcagataaataaatacatacataaataaataataaaaagttgagttggggcgtaagtaagctgctctgggcaccacccacaccccagcctgacccatcaccaaatgggccagtcagatcactcctggggcttgggattccttgactgccaagtggggctgatgacaaggccatggggaagattcatggtggctctgggcagggccaggagtggcacacagtgagggggcagtaaaaggcagaggagggcggaatgcagatcatgggatggggcagccgagaggccactgcacgctgagagcctggccgacacttggtgggacggtcgttggcgggggcgcccacccggaacacctctcgcccccggcttcccctcggccagctgggatgccacctgctccgagatgccagccagcgcaggctcagccctggtgaccgccccaccctcagccctgacaggacgcctggcagtgtgccctacgctccttctccagccattgccgaacccctgaggctgccggcagccccctcaccactcaccggggccaactgagcctccctcactgagtccctgccccgtgggatgggaaggagagaggcagggaccgcgaaggtggggagggaggaggagaaaggggaatagaaggaaacaagagaaagagagagagggagatgagacagaaaatgaaagatcaaggaaggaggagacagaggcagctcaagggaggagaaatggggaacaggagggaaacagaatggagggggaaggcaagaaacgaagcctggaaaggcagaaggcaagagaatgcaactgggagccagagaaaatcgaaaaggaggtagcggccagcttagccagggctcaggagagcatcacagcctatgaagccataaggcctgggtggtttaggcggccgtttcgctgtgggggccgagccctgccccagcaggcctgcccccgccccagctgccaagccagggctcctgggccctcagccagccctgcctgggactggccttgggcacagattggcaaactgctccataaagagggactgcctccccactcaagctctgtaaggacgcaaagagggcaaggccacgaaggactcagcctggcccatcgtgtccctgctctgccccagtgccagagccagagccagagccactgtggctgctattctgtttgtgatgctagcctagggctcgtaagaagcccccagaaatgggcggccccctatgtgccctcgccctgcagacctacctttgtcactgtcagggtctgagtcgctgaggggcttcaggggcgaatgcaggtcctggaagtagcggtggccagcttcgcactgccacacggccgtggtgtacaggccaaaagtggggtctagctccgccaggtgcggctcgtacgggcagcggtgcttgtggtcctcgtaccagatcaccacgttcttcaggcagttcacgttgcgtcgccgccctatggacacagggccgaggagtgggtataagggacagggctcagcccatggtgacatggctgcctgaaccaccggggctttatgggtcccatgggtttggaggccctcctgagtaccatccaggcctgtacccagtttaaagggggaaactgaggctcagagaggagaggcaccccctggaggtaacggggactgttctattggcaaagtcatgtaaacagtggagcctggtgcacagtaggtgcataataattgttagctgcttgttaattgttctcatcttcatcaaacgcctagaccagcgcagtcctcaggcccaggactcccaggctcccgccctaaccaccccctacagccgcaagggggcgcctgtgaatgcccgagtcaagtctgttccctcctctgctcagaatccactgggccaggcgcaatgactcacacctgcaatcctagcactttgggaggcagaggcaggcggatcacttaaggccaggagtttgaaaccagcctggctaacatggcgaaaacccatctttactaaaaatacaaaaattggccggcatggtggtgtatgccttttgtcccagctacttgggaggctgaggtaggaggatcgcttgagcctgggaggtggaggatgcagtgagccaaggtcgcaacactgcactccagcctggatgacacagcaagaccaactccctcagggtaaaagccaaagtcctcccttcggcccacaaggcccactgtgacttgtcacctccccgccctcacccacttggtgactgcactccactccagccacatggcctcctcgctgttcctggagcgggctaggtgtggccctgcctcagggccttggcacaggctgtgcctgcttcctctagataactgtcttgctccctccccacttcactcaggtctcccccaaatgcatcccctccaagaggccactccctgcccagtcactctagccgaccttaactttgctgtctgttttctccaggtagtacctagatgccatctgtggccatttgtttacatgtgccctgtctgtctctcccaccagaatgtcagctcctcaagagcaggaacactgctgttttgctcctcctgtacccccagtgcccccaaagggcctggttcatagcaggtgctccaggaacatttgctggatgagagaacgctgcatagcgggcgggcatggtggagccggaccgcctgggtttgaatcctggctctgccccttccaagctgggtagctccaggcaagtgacttggcttctctgagccccaggtgcctcctctaggctggggagaataagggattcccatcccggagggctgccaggcaggaggaagggagtgaagacatcgccaggacacagaacaaggctgggcacacagtgagtgctgggaaatggtatctgactcttgtgatggtcctggtccctcagccaagtgcgaggacagcatgtcccccactcctaccctgtgggccgggagatgaagaggggcccagaagaggtgtttgggtctagggaatgtgctcacagtctccaatcatgagggcaacagagtcgtcacccacagccgcctctccggcccagccctttccctcctcaatgcgctcctcatcccttgaggattcaggatcaaggtcatagctcacccctgcctctggagaaacctaagaagggaggggctcactgccaccagctggccttcaccctgctggacatggcctgggacccccagctccagggctcagagctgtgcagaccctgacagttcaagctctcaccaactggtggccagcaggacaggaggagcaagctccagacctcccctctaaccaccagtgcttggctccccctgcccttagggctctgcaaaagctgttccctctgctcggctctcccctggctgactcccatgccgggagcaagagaatgagggagccaaggacactgcgcctgagacacaagacacgcagacccgggtttgaggtcgggctctgctggttccaactgtgctgcctagggcagcgacctggcctctctgggcctccatctccatattcccaccgctcccaactctccccacctcccccaggctgagcctccacttacttttcttccgctttggctttttggggacctgctcccaaggcttcctgcaacagaaagaggcagagagggtgaacgggggaccagcgctgggcctgtctgacccatgagtaacaacagtggctagagccactgctcattgtacactgaaactaaatctgaactttttgagatggagtctcactgtgttgcccaggctagagtgcagtggtgagatcttgactcattgcagcctttgcctcccaggttccagcgattctcctgcctcagcctctcaagtagctgggattacaggtgcacgccaccacacctggctaatttttgtatgtttagtagagacggagtttcaccatgttggccaggctggtctcgaactcctgacctcaggtgatccgcccacctcagcctcccaaagtgctggtattacaggcatgagccgccacgcctgccctgaacttttttttctttttgagacaatgtctgtctctgttgcctaggctggagtgcagtggtgcgatctcggttcactgcaacctccgcctcccaggttcaagtgattctcctgcctcagactcctgaatagctgggattacagactaattttgtatttttagtagagacggggtttcaccatgttggccatcctggtctcaagcttctgacctcaggtgatccgcccacctcggcctcccaaagtgttgggattacaggcgtgagccaccgtgcccagcctagaatctgaacttctatgtacctttccccaactccagaactgtgtcaccaggcccctcccttggactctctccccaattgccatcagccctgggagggggctctagcatcatccacctcaaggagcaggaaaaacaggcttggaggggtgaggccatctgccctgggtcccacagtcagggagcagagaagtaacaaagtgggtatgaaaagtttgtgtggaagcagaattccaagatggcccccacagttctgctgggacacatgccctgtgtgatcctcttcccctgagcggggcaggcctgtgagtaggactggatgtcaagccttggttaggtgactgtgagttaatcaaacgggaacatatcttgtagggcacagtggctcaagcctgtagtcccagctacttgagaggctgagagtggtcttggcccacagccagcaagacagtgggtactgtctgggtgtggtgtctcacacctgtaattctagcactttgggaggctgaggcaggaggactgcttgaagccaggggttcaagaccagcctgggcaacatagcaagatcccacctctatttatacaattaaaaaaaaaaaaaaaaaaggccaggctccgtggctcattcctgtaatctcagcacgttaggaggttaagacgggtgcatcgcttgaggccagaagttggagaccagcctgggaaacacagtgaaaccccatctccacaaaaaatacagaaattacccaggcggggtggcatgcacctgtagtcccagctactcaggaggttaaggtgggaggatcacctgagcctggggaggtcaaggctgcagtgagctatgatcacaccactgcactccaacctgggcaacagagtaaaaccgtgtctcaaaaacaaagaaacaaacaaaaacaaacaaaaaacgatcttcgtcatggtacagccctgtcacttaatcatcaataagcaaatggtacaatgatcgttatgattatcagtatcatcgtggagcctgggccccctggcctccctgctgtggcccagacctgctcttgccacaaacatcctgacagccagtctagtgtctcttatcagcaaaactgtccaccccgtctgactcctgcccagccctgtaacaattctcagtcccacacccgtctggttcccaggactgcaccttggggatcttccatctttcctgccccaggctctgcccctgcctctggctctgctactccaggtcccattccatgtgactctatcccttcccatggctccaccctcccctgcaaagcaccacactggctgtagagaccttcacccaacccaagacccaagtctggctctgtcacccaggttggagtggagtagcactatctcagttcactgcaacctctgcctcctgggttcaagcgattcttctgcctcagcctcctgagtagctgggattatagatgcctgccatcagcccagctaatttttctatttttagtagagacaggatttcgctatgttggccagactggtctcgaactcctgacctcaagtgatctgcctgcctcagcctcccaaagtgctgggattacaagtgtaagccaccatgccctgccccaaacccaagtcctgatgtccacagccacctccatccactcaccgctggaggctgggagtgtcacattgcagtggggacagtcttgggtatcagccagacccaagttcaagactcagctctgctctcaactgcctgtgtgacctcaagcaggtcttgtcccctctgagcctcagtctccgtctgtgaagtggaaatagtagtagtgcttctgacacagggtcaccatggggaccaaacaaggtcatatgtaacctggtgagcgccactttccaacccccacacagggctttctccctcaaactgccttccctctcctgtccacttctccaacttctgccacttctctgtgactcccagcagaggccactggcatcaaggaccacagctccggggctactcaggccctggcttggctgtttcccgccatttcctttcagtcttcagtcattcccaccagcatctaaatatgccatgatttctcccatcttgggttaaaatcattttgatacccaccttccccaccagccccttccccatatctttttttttttttttctttttgagacaggctctcgtggtgttgccccagctggagtgcagtggcgccatcacagctcactgaagcttcgacctccagggctcaaccgatcctcttgcctcagcctcctgagtagctgggaccacaggcatgcaccaccacacccggctaacttttgtactttttgtagagatcgagtttcgccatgttgcccaagctggtctcaaactcctgggctcaagagatccttctgcttcagcctcccaaagtgctgggattacaggtgtgagccactagcacccagcctccttcttcatttccccgttttgtcacagttgtctacactcgctgtctccatgtcctctcctccatctcactggaactcctccagtcagagctttgctccatcacgtcacacactctcccatcacagtcaccagtgacggcttcactcggcccaacagcactggacatggcagacacttcctttggcctcctgggtgctgccactgcccagtgctccactggcaccgggctgctgcttctccctcacctcccttaccaaggagagcaaccgccacactcaggcctgtgttttctgtctaaaagtatccctttagtaacttttttttttcttttgagatagagcctcgctctgttgcccaggctggagtgcggtggcacgatcttggctcactgcaaactctgcctcctgggttcaagtgattctcctgcctcagcctcctgcgtagctgggactataggcgtgtgccaccacgcccagctaatttttgtatttttagtagagacggggtttcaatatgctggccaggctggtctcgaactccttacttcgtgatttgctcaccttggcctcccaaagtgctgggattataggcgtgagccatcgcgcctggcctatttttattttactttttgagacagtcttgctctattgcccaggctggagtacagtggcgcgatctcggctcactgcaacctccacctcccgggttccagtgattctcctgcctcagcctcccaagcagctgcgactacaggcgtgcgccaccatgcccggctaatttttgcatttttagtagagacagggttttggcctattggtcaggctggtctcaaattcctgacctcaagagatccacctgccttggcctcccaaagtgctgggattacaggcgtgagctaccatgcctggtcttccttttttttattttaattgttgacaagagtcatgaacctccttggactcatcatcagctttaacaattgttaactcttggccaaccttgtatcacaatgtgtaccccatccattcttcaagccacacacatcctagagacagtttcttctaaaatacaaaccaggctgtgtgtgacttgtagtcccagctactctggaggctgaggtgggaggatctcttgagtccaggagttcaagaccagcctgggcaatatagcaagactgcatctcaaaaataaataaacaaataaataaggaaataaaaggccaggcccaggcccgggtatggtttcatctttacatttaaatctgcaaccccgccgggcgcagtggctcacacctgtaatcccagcactttgggaggccgaggcaggcagacctcttgaggtcaggagttcgagaccagcctagccaacatggcgaaaccccgtctctactaaaaatacaaaaattagccgggcatgggggtgcacgcctgtaatcccagctactcgggaggctgaggcaggagaatcgcttgaacgcgggaggcagaggttgcagtgagctgaggctgcgccaatgtactccagcctgggtaacagagcaagactccatctcaaaaaaaaaaaaggtggggggggcatcaggggaaataaaggcagaccataccacttctttctctgtacaaaatcttgcacttaagaaaaggctcccacctcactgggaggaaaaactggagtcctctccatggctctggatgaccttccctgtcaccaatctgtccttgtcttcccttctccccctcactcattgcagtccagccacacaagcctcttcagtgttcctggcacacaataggcagggtcctgcctcaggacctttgcctttgctattccctctgcctcaactcttccccagagatctgcatggctcctcctaggttccttcatgtctttactgaaatgctatcttctgaatgtgaccaccttaactccctatttaaacttccaactcacactcttcatttcacttttgttttttccgtagcccctatctctcatggacgatacaatttacttatgtttctggtctgcagtaaacaagccttttgccaggtatggtggctcatgactttaatcccagcacttcgggaggctgaggacggaggatcccttgagccgaggagttcgtgaccagcctgggcaacatggcgagacccccatctccatgaaaaattaaaaaattagccaggtgaggtggctcctctgtagtcccagctacttgggagactgaggcaggaggatcccttgagcctgggaggttgaggctgctgtgagctatgaacatgccactgtactctggcctgggtgacaaagtgagaccctgtctcaagaacaaacaaacagggctgggcacaatggcttacacctgtaatcccagcactttgagaggctgaggccggagaatcacttgagcctaggagtttgaaatcagcctgggcaacacagggaaacctctgtctctacaaaaaatacaaaaattagccaggtggagtgacgtgcacctgtggtcccaactactcaggaggcggaggtaagaggatcacttgaacccacgaggttgaggctgcagtaagccgtgatcatgccactgcattccactctgggcgagagagtgagaccctgtctcaaaaagaaaaacgagggccgggcgcggtggctcacgcctgtaatcccagcactttgggaggccgaggcgggtggatcacgaggtcaggagatcgaggccatcctggctaacagagtaaaaccctgtctctactaaaaatacaaaaaattagccgggcgtggtggcgggcggctgcagtcccagctacttgggaggctgaggcaggagaatggcgtgaacccgggaggcggagcttgcagtgaacggagatcgtgccactgcactccagcctgggcgacagagcaagactctgtctcaaaaaaaaagaaaagaaaagaaaaacgaacaaaaaaaccccccagacctttgaacaagccatcccctctgcccaccagaatgtccgctccatgaggcaggtatctttgcgctcccagcatttccagtcctgctcttgagcatataagccagcctgctgtcctgggaaaggggtgggtataacttagcaggatctgtttgattcttgactctcagaatctccccccagagaaacatgagaacatgtgtacctgaaaaccagggcagaacaaggatttccttgcggcactgcttgtgatacggaataaacgtcatcctcgtaaaagttaatacttagggaacccactacctgccaggcactcttctaagctctttgcctattttaactcaatcatcacatcaacatataaggcaggaagggaaaaactccatccacactgctccttctcaagactgagaatttacaaagacaggcctctctgccctccacctgccaagctaactaggggtttcctcttcatccgagtctccctgggctgagttgcttcacagaaataggtttaggggagtgcagtccaggttgtgaagggtcccccggatgtgttggatctagggttgtgggaatggggccatacggagtcccagatggggcaccagaacttcaagaagggcagggctgagtgccccagggtgtccagagtcccaggccaggtggggaactaagcgggggaggatgagaccggtgagggggcggggctgcccccccagggcctggttagttacaaggcctggaggtggggccagtcccaggattgggccgccagagttctagcgggcggggccaagcgctcagaaggcgggtcgaggggctgggtgcaccctaggattgggcagtcggaacgatgggaggcggggccacgagccaggcgcgtcccggccaggcagtacgagacccaggccgccggcccggctcctgggcggggtccgcaggtgccgggggctggccctagaagcggagggggcggggtaaagcccggcggggtctgggggcgtctcctccctccctccctcggggccaggccccctcacccgtggcggccgctccgctggccgcgctccagagagatgaggtaggcggcgagcttggcgtcgctccagccgctgcggcgccgcaggtccacccagggcccgtgcgcctcgcccaggtacacgcgccgcacgtcgtacttcttccgggactcgagccgtcgccgggcccggtccgactccgtgagtcgcggccggccccgcgcctttcggcccgctgcgccctcctcggctgctgcctccccgcccgcgcccgcctcagcctccgcctccgcctcgggctctagcgcccgctccgccatcccccccaccctggttaccagcctcccccgttgttaggagccagaccggaagtggcgcgcatcttcggcgccgccgagaaatttctcacggtctctcgctgccccagggcgccaaaaggagaccaagaatggaaactgcgcatgcgcacaaccaacagcgctcccgcccctttttatttgaattcggagaaccagaggcgcctgcagattctggaggggtctcgcctgcccatcgctggcagcccgagatcctggggaggggatgccatactgctagagatgagggaagagagccccaagcaggaaaacattgatttgctgtacactcaaagggcatctcatgccttcagtccaccgcctcctcgggccacagcccgtgccctcgcgccggctcagactagctctggccctgctgctgtcgctgcaggttgtcgtcttcttcctggtggtcctcgggcaggggcggctcctccagccctgcagaggatgtctggagctcccgggtggacccggcgaggcggaagaccacggggatctgggccagggttgggttggtctcctgcaggccctggatccacttagccatcgtcgcctggtcatgagcacccgccatgcacatggcgaagacagggccttcctccactgttggaagacatgcacccttaaggtttgcacagtgggggctgcagcggctaacccatgcctacacctttttgaggtattttacactcccttccacttcctttttttttttttttttttttttgagacggagtctcgctgtgtcacccaggctggagtgcagtggcgagatctcggctcactgcaacatccgcctcccaggttcaagtgattctcctgcctcggcctcccgaggagctgggattacaggtgcacagcaccacgccgggctaatttttaaatttttagtagagatggggtttcaccatgttggccaggctggtctcgaattcctgacctcaaatgatctacccgcctcagcctcccagagtgctgggattacaggcgtgagccactgtgcccggcttccttccactttcttgtgcctccaaacctttgcacaagctagccccgctgcctaggctgcccactccacacttcacccgggcgatgactcctggtttttctgtattctgccaggaaggcctcctgaccccccactcaaggcatgctcctctcctaagctccccaaagtgtaatttgcctgttcccttgctgactcgagggactaggtttgtcctggtgacacccagtagccagcacagagttgtaggagggagggaatgaacaagggccaacagggctgggtgacctcaggtctggagcccctggggcaaatgagtgtgtgcggccggaggacgagggtgtaagtggactgcgtctcagcctgggcctaccccttgaccccagaggccgcccctcatcctgggtggtgtttggaatgtttggaagtcctgcctgtccaggtttttgccttttttttttttttttttgacacagggtctatcatgtaggctggagtgcagtggctctataatagttcactgcaacctcaactcctgggctcaagtgatcctcccacctcagcctgtaggagggctgggattacgagcacacatgtgagccaccgcacctggcccagtttttaccttcattgatgtcaaactcgtagttgtcccagccactcctcacatactccaggtccagctgcatcgggtagtagaggttccactcctccggcgtctcttccacttcctactccaaggtggggagtgcaggcggggtcagaggccagggctctctcggtctccctcctccagcctctcccatgcaccctcagggtagtgccagcccactccccagccccaacacatgctttgctttaagccctcaccctctcctccgggggcagcaagtcagctctgaggatgtggtaatacacacacttgttgcggagccacagggagaaggggccctcaacaaagacaggccgggctggattgtggcgggccagggcggcctgctgatcgggactctggattcctggtgtggagacatacatgccctgtgccctgcaagggactcggcccagaggcccagggagcccagcctaggcccagcgagaacctggcagggcctgggtaaggttagagacttggctgcccccatgctctcggacttacctacgatgtggggctgggggggatctgctgcacctgttgagtctttgggcaaaggaacctgcaagggagagtagggatataatcttgtaacccccaatcccctacagaggaactggggacagagaaacagaaagggggataccagggaattcaggacacctctcctggatctggtacacggccctccaacctgtcccctcctccctctgtcccatttggcaataaccaccaatctttaggatgctcaccctgagggaactaccctagaaccagcccacctttgtcaaaatcctggctctgtcacaagctgtgtgaccttggccaagtcactgtacctgtgtgcctcagtttctccagatgcacaatagggatgataacagcacttaattccgattttttttttttttttagggatgggggtctccctctctgtcatccatgctggagaatggtggcatgatcatagctcactgtagccttgaactcctgggctcaagtgatcttcctacctcagtctcccaagtagctgggtctacaggtgcacaccactatgcctggctaattttatttttttaatttttgaaatggagttttgctcattacccaggctggagtgcaatggcatgatctcggctcactatagcctccgcctcctgggttcaagcgattctcctgcgtcggcctcccaagtagctgggactacaggcgcctgccaccatgcccggctaattttttgtatttttagtagagatagggttttgctatgttggcctggctggtctcaaattcctggcctcaggtgatccgcctgccttggcctcccaaagcactaggattatgggcatgaacctaactttgggtggttgtaaaatatgtagcacagtccctggcaaataataagtgctcagtgcttgtgaattaaaaaaagaaaaataacttcacatatacagaatatcccaggaaggagacactagaagcaaatgatagctttcacctctgtggaggacagggtgggaaggaataccttttttatcttttaaaattttataccttgaacataattcaaaaacactagacaattttttttttttttttttgggacagagtttcgctcttgttgcctaggctggagtgcaatggggcttgatctcagctcaccgcaacctccacctcctgggttcaagtgattctgctgcctcagcctcccgagtagctgggattacaggcatgcaccaccacgtctggctaatgtctgtatttttagtagagacagggtttctccatgttggtcaggctggtctcaaactcccaacctcaggtgatccacctgcctcagcctcccaaagcattgggattacaggcataagccactgcgccccgctgacaaagtttttttttttttaacaaaatgcacttgcttttgaaacaaaacagtggacagctattagaacatatatcattcatcctttcaagttaaaaaaaattgagatgagcaggccgggcgcagtggctcatgcctgtaatcccagcactttgggaggccgagggtggtggatcacttgaggccaggagttcaagaccagcctggccaacatggtgaaaccccgtctctactagaaatacaaaaattagccaggcgtggtggcacacgcctgtagtccctgctacatgggaggctgaggcacaagaattgcttgaacctgggaggaggaggttgtagtgagccgagattgtgccactgcactccagcatgggcgacagagcaaggctctgtctcaaaaaaacaacaaaaaaatttgagatggatcagtgacttctagttgtattaaatgaaatttgtaaaaggcaaggtacatgtatataatgccctgctactaaagaaacttttttttttttgagatggagtttcgctcttgttgcccaggctggagtgcaatggcgcgatctcggctcactgcaacctccacctcctgggttcaagtgattctcctgcctcaccctcgcaagtagctaggattacaggcatgcaccaccatgcctggataattctttttgtatttttagtagagacgaggtttctccatgttggtcaggctggtctcgaactcccaacctctggtgatctgcctgcctcggccttccaaagtgctgggattacaggcgtaagccaccatgcctggctaaagaacttcttttttttaaacagacaggatcttgctctgtcacccagtctggtgtgcagtggtatgatcacggctcactacagacttgacttcctgagttcaagccaccctcctgcctcagcctcctgagtagctggggctacaggtgtgcaccaccactcccagctaattttcgtatttttttggtagagatggggtcttgccatgttgcccaggctggtctcgaactcctgggctcaagcaatccatctgcctcagcctcccaaagtgctgggattacaggcatgagccactgtgcctggctgtattttactccataagacgggggagaaggatatttaaatacaaaggatacagatgccaaaaaaaaaaagagagagagagagagagatctgcttgcaaatgtatagaacctctctggaaggagacatggaaatagtcacctctggggagggagacgggcggcgtcaggggcagcgcacggggcctgggtagaagcagaggactcgtcactgtgtgcttttacatgctgtttggctttttagtgcattgctttgcaaaatgaagaaatgaactaaaaacaaccctcccccccacattctgctgctggtctcaagccatctctcacctggacccacgaccctggtcccctagcccctctccccatccaacagcatccacacggctgccaggagacacgtttccaattgcagattcttccagaaacatgattccaacccgattccttcttcttaaatctctgcccccccacccccggcatagctctccccaccaaccaagaggtttgagatcaagctctttaatcaggtgcccccactcactgcaccgcatttcctggtacacactgctccctctgcccagcgtcctctgctctccttacctcccccaggaagccccacctgcccactcggctcccacagcaccccgggcttctccatctcagaaccactggctcttaaggaaactgttatctgtccaggaccacatgacaagtgctgtgaggggctctctttggatcccttgtgtgatctggcatgagtgggggctcccaggacactgagttgagggtgttactccactcagtcattcaacaaaccactgccaagtgtcagctttgcaccaaatcctgtgctcagccttgggagacaggagggagactgagtcatggtgaatgaggaaccaagccaagcacggtgaaggggtggtgccttggccagggaggtcaggaagggcatcctgattaggaacagtggagctgagaccggaataacatgaagtccatggggaacagtgttcctggcagaaggaacagagaacgcaaagccctgtggtgagaattggcacagaaaataaggaagatgcctagaatgtagcaagtgttgggagaaggatgggagggtgctatggtctgaatgtttatggccccctgaaattcatatgttgcaatctatctacaatgcaataggattaagaggtcaggcctttgagaggagaggcacttagatcataagggctctgccttcatgaatgagattagtccccttataaaaaaggtcttggccgggcacagtggctcacgcgtgtaatcccagcactttgggaggccgaggtgggcagatcatgaggtcaggagatcaagaccagcctggccaacatggtaaaaccccgtttctactaaaaatacaaaaattagctgggcctggtggtgcatgcctgtaatcccagctacttgggaggctgaggcaggagaatcgcttgaacccgggagtcagagttgcagtgagctgagatggcgccacagcactccagcctggcgacagagcgagactccatctcaaaaaaaaaacaaacaaacaaaggtctgagggggccaggcatggtggctcatgcttgcaatcccagtactttgggaggctaaggtgggtggatcgcttgagctcacgagtttgagaccagcctgggcaacatggtggaaccccatttctacaagaaatacaaaaattagccgggcgtggtggtgtacgactgtagtcccagctacttgggaggctgaggtgaaaggatggcttcagcctgggaggtggaatttgccgtgagccaagatagtgctactgcgctccagcctgggcaacagagccagaccttgtctcaaaaaaaatatgaagaggtctgaggggcttgtttgccccttatattatgtgaggacacagcaaggtgtcatctttgaagcagagagcaaaccctcaccagacctagatctggtggcaccttgatcttggacttcccagcctctagaactgtgagcaataaatttttgttgttcatcaatgacccaagctaagagattttgttagagcagcctgaacggactgaagcagaggtcactcaagctgtgctagcagtaaggaccatgggaacctaccaggggactcagccagagaatcagaactcaattcacggccaggcacagtgcctcatgcctgtaatcccagcactttgggaggccgaggcaggaggattgcttgagcccaggagttcaaggccagcctgggcaatatagtgagaccctgtctctgaaaaaaaaaaacagtttttttaattagccaggcatagtggtgtgtgactggagtcccagctactcaggaggctgaggtggaaagatcgcttgagcctgggaggcagaggctgcagtgagccgagatagtgccaccacactccagcctgggcaacagagcaagaccctgtctcaaaaaagaacttgattcaccacaatcactagagtgagagaaggggagcccaggggaggaatggcgggagcctggcctggggtggcagctgacgctgtagacaagggcggatacctggtagatggtgaccctggcactaaggtcaggctccatgtgccgcaggccaaacatggccagctccacagggtcctggggcaggtcccggggcactgggaaggggttgacgttcatgaatcgagggaaccacagcttcaggcgcaccaacttgagcatggggtagcttttgcgtccaaagatctgaatcagcaggaactccgtctccttgttgggcatcacacctgtgctgggcagatgcaggcagaacctcagagatggagggggaggagggaagggaagaggagaaaagaaaacagtgaagtgagggaattgatcacagacagggagaaaagaatcagagagaattagaaagaaaaaggctcatgcctgtaatcccagcacattgggaggccaaggggagaggatcacttgagtccaggagtttgagagcagcctgggcaacatagtgagaccccatttctaaaagaaagagagaaagagaggaaggaagggagggagagagaggcagggaggagaggagaagagaggagagtggggggaggagagggagggaggggggaggggaggggaggtcagagggaggcaagaaagagagatgagtgatgaaaagagggattcggagagggagaagagcgagagagacagagacggagccatggaggaaggaggggctgagactcaggagaggtgctgccagctatcagtgtagcccactccccaccctgcgccagcctcctggcctcaccgtggttctccatctgctccaggacagcaatcccacactcctgctgccgagggtagtggacgaagatgcgctggatgatgttgcgaggccggaagacctccttggggaagatgttgagcagctggttgtacacagccaggtcccgctcgacaccatactcccgcatcttgcgcagggccaggtagatgaagtcaatgtggccccgcttacgcacgctgtgctccgcaaatttctgcaccgtctgcaggaagctcgccttgtcccgttccccaccaggcgcctgcccaaacaggtcctcaaagggcaccagagccttggtgggcctctgccggggttccggtgggctgggaaccagggactgttcagagctatgggcagctgcgctgcagtggaggccccgagggagccggcgagggacctggggagggaggagaactgctggaatctggcacctctcagtgtctatggggggccgccaggctggctctttcctcagagaggtcccagtggcctccctgaggactcggaggtatggaactgtggttacaaacccaagattcgaggccattacaaagtgcgataaaacacaatgctggcacagtagggaggaaacaggcactgttagccatggctacggggagctggtaaaaactgccacggaggcaacttggtaatattcacagtgatgacacacacatgccggtttttttttgggtttttttttttggtttttttttgagacggggtctggctctgtggcctaggctggaatgtagtggtgctactgtggcttactgcagctttcaactcctgggctcaagcaattctcctcctcaccctgtccagcagctggaactaccggtgtacaccaccacacctggctaatttttaaattttcagcagagacgggagtcgcactattttgcccaggttggtcttgaacgcctggcttcaagtgatcatcccgtctccacctcccaaagtgttgggattacagacatgagccactgtgcctggtggccctttttgcttgtaattttttttttttttttttagacagagtctcattctgtcacccatgctgcagcgcagtggcgtgacctcagcccactgcaacctctgcctcccatgttcaagcgattctcatgcctcagcctcccaagtaagctggactacagacgtgctccaccacgccctgctaatttttgtatttttagtaaagatggggtttcatcatgttggccaggctggtctcaaactccaggcctcaagtgatccacctgcctcagcctccccaagtctttttttttttttttttgagacagagtctcgctttgtcacccaggctggagtgcagtggcgcgatctcggctcattgcaagctccacctcccgggttcacgccattctcctgcctcagcctcctgagtagctgggactacaggcgcctgccaccacgcccagctaattttttggatttttagtagagacggggtttcactgtgttagtcaggatggtctcgatctcctgacctcgtgatccgcccgccttggcctcccaagtgctgggattacaggcatgagccaccgcgcccggcgtagccaccttaagtcttgagattacaggcatgagccactgtacccagccccttctttctttttctttttttcttgagacagagtttcactcgtcgcccaggctggaatgcaatggtgtcatctcagctcactgcaacctctgccttgtgggttcaagcgattctcctgcctcagcctcccaagtagctaggattacaggcgcctgccaccatgcccagctaatttttatgttttgtttgtttgtttttcctgagatggagtctcgctctgttgccaggctggagtgcagtcacacgatctcagctcactataacctctgactccctggttcaagcaattcttctgcctcagcctcccaagtagctgggattacaggcacatgccaccatgcccagttaacttttgtatttttagtagagacagggtttcaccatgttggccaggctggtcttgaactcctgaccttgtgatccgcccacctcggcctcccaaagtgctgggattacagatgtgagccaccatgcccggcctaatttttgtgtttttagtagagacggggtttcaccatgttggccaggatggtctcgaattcctgacctaaggtgatccacccaccgtggcctcccaaagtgctgggaccctttaagagatggagtctagctatgttgcccaggcgggagtgcagtggctattcacaggcatgagccaactggtcagcacaggagttttgacctgctgtttccaacctgggtcagttcacacttccttaggcaacctggtggtcccccaagtcccaggaggtcacaatattaagcaaaacttagtgcaggacactccatcagcatagtgcacaacagcccagaactcctgggctcaagtgatcctcccacctcagcctccagagtagccaaattctggttctagatgacacagtaacaaatttcttattttaaattgaatttttaaattagaagggttacatataaggcatcttaaaaatatacagctagttatcaaggttgtactgtgctttgattgcaccaccgcattgcagcctgggcaacatagtgagactccatctctctatgaaaaaataaaaaaataagcggggcgtggtggtgtatacctgtagtcccagctactcaggaggctgaagcaggaggactgcttaagcccaggaatcccaggctgcagtgagctatgattgtgtcactgcactccaacctgaacgagagagtaaaaccttatctctaaaaaataaatgaatgtgtgtgtgtttatctacacacacacacacacacacacaaaacgctaacaagtaagagccaatattagtccaggctcggtggctcacacctgtaatcctagcactttgggaggctgaggcgggcagatcacctgaggtcaggagtttgagaccagcctgggcaacctgctgaaacctcatgtctacaaaaaaatacaaaaattagccaggcatggtggtgaatgtatgtagtcccagctactcaggaggctgaagtaggcagatcaattgagactggcgggtcgaggttgcagtgagccaagatcacgccactacactccagcatgggcaacagagcgagaccctatctcaaaagaaagagacaatatttaccaaatattcttccactgtagacacagttgagcactttacaaatgtgaggccctaggtggggggtactcttactgcactcattttacagatgagaaaaaccaaggctcaggaagatgaagtgggatgcacagtgttacacagctgcaaagcatcagagctgagaatggagtcagtgccctcagtccccctactctgcggtccccacagccatcccatatcgttctttgataaggcaatgttaaaaaaaaaaaaaggcattcatttacagtaaaatttcaggttgggcgcagtggctcgtgcctgtaatcccagcacttttgagaggcgggtggatcacttgaggtcaggagtttgagaccagcctggccaacatggtgaaaccccatctctaccaaaaatgcaaaaattagccaggtgtggtgccgcacacctgtaatcccagctactcaggaggctgaggcaggaaaatcacttgaacccgggaggcagaggttgcaatgagctgagatcacgccactgcactccagcctgggtgacagagggagactccatctcaaaaacaaaaaacaactgaaatttcagtcaattaataatataggtggtgtagtattgtaccactttggggtaaaaatcagaaaggaagctctaaaatgcctaacgagggggaaacactgcaaaggaggtaatgtaaatgaaatgcatagtgcggggccgggcacagagtaagtgctcaatatgggaactattaatattcccaccatcatcgttattgctatctatggctgtcaatctgctttcgccatctggtcactatgggtataggaaagaaattcagttttctgccccatcttcacaagtagatgcaggaggagctgctcacagtcaccacacaaatccaccgagctcatacatccttattttcaaagtcaatcccctcacccacgtaggcactagcatctcttaaattagggtccaggcacagtggctcacacttgtaatcctagcactttgggaggccaaagtggaaggactgagggcccagaggttcaagaccagtctgggcaacacaacaagaccatatacttaaaaaaaaaaaaaattagcggccgggtgcggtggcttatgcctgtaatcccagcactctgggaggccgaggcgggtgaatcacctgaggtcaggagtttgagaccagcctcgccaacatggcaaaaccgcgtctctactaaaattacaaaaattagctgggcgtggtgatgtgcacttgtaatcacagctactcggcaggctgaggcaggagaatcacttgaacccaggaggcagaggttgcagtgagccaagaccacgccactgcactccagctttggcgacaagagcaaaattccatctaaaaaaaaaaaaattagctgggcatggtggctcaaatcagtgatcccagctactcagggggctgaggtgggaggctcatttgagcccaggagtttgaggctgcagtgagccctgattccaccactgtactccagcctgggtgatagagcaagaccttgtttcaaaaaaataaataaattatggacttttggccaggcgcggtggctcacgcctgtaatcccagcactttgggaggctgacgcaggtggatcacttgagcccagagttcaagaccagcctgcccaacatggtgaaaccccgtctctacaaaaaaaatacaaaaactagccgggtgtggtagtatgtgcctgtagtcctgggtacttgggaggatgaggcgggaggattgcttgaacctgggaggtcaagactacagtgagctgtaatcacactactgcactccagccttggtgacagagacactgtctcaaaaaacaaacacataaacatacatacatacataaactaaggacttttaatgggacctcggcactgataggccagcccagactcaccagaactggcttcacagagtggattctgaaggagttgggagcaaatcccaagcttacctccctctacccaaaagactgcctggctggtgcttacctgagagatggaggttcctgtgagggcggccccgcaggtgcctccccaggccctacagaggcctcgggccagtagggtggcctggacccagctcatgcctctgcttgtcagacaatcacctggcccaaaagaagattcagcattagcctggcaccttacagatgctaacagacgcaagggccccgcagggtcgagggcacactccagattatgtggctcactcaccagccccaatgtttaccttacccaagaaacaggctgatgactcaaagactttgttcttgggacagcaccctaatcctgctgccccaggggcgtgatcatagctcaatgcagcctccaacttctgggcccaagtgatcctccagccccagagcgtcgagaagctgggactacagacgcgtgccaccatgcccagctaatttgaaaatagtttgcagagacccagggtcttgctgtgttgcccaggctggtctcgaactgttggcttcaagtgatcctcccatctctgtctccaaaagtgctgggatcatgggtgtgagccagcactcctagccactacaatctaattttacaaaatctgtgtcactccaacaagaatccctgtacctggccaggcgcggtggctcacgcctgtaatcacaacattctgggaggctgaggcgggcggatcactcgaagttgggagttcgagaccagcctgaccaacatggagaaaccccatcgctactaaaaatacaaaaaattagccgagcatggtggcgcacgcctgtaattccagctactgggaaggctgacgtaggagaattgcttgaacccaggaggcagaggttgcagtgagccaagatgatgccattacacctcagcctggggaacaacagcaaaactccatctccagaaaaaaaaaaaaagaagaaaaaaaaaaaagaaagaaaccctgtacccattagcactcaatttcccttcactcccaaccccaagaaaccactcatccactgtctctatagatctccctatgccggccatttcatacaaatggaatctggaatcacaagtgctcctttatgattggtttccttcacttgacatgttttttttcttttttctttttttctgagatgcagtctcgctctgtcacccaggctgaagtgcaatagtgccatctcggctcactgcaaccttcgcctcccggattcaagcgattcccatgcctcagcatcccgagtagctgggattacaggtacatgccaccacgcccggctaatttttgtatttttagtagagatggggttttatcacgttggccaggctggtctcgaactcctgacctcaagtgatccgccagcctcagcctccccaagtgctgggattacaggcgtgagccaccgcacctggcccactgacgtgttttcaaggttcatgcatagatttttttttaatttttattatttttatttttagacaggatcttgctttgtttcccaggctggagtgcagtggcacaatctcagctcactgcaacctctgctttccgggctcacgattctcctgcctcagcctcctgagtagctgggactataggtgtgtgccactgcatccagctaatttatagatttttttgtagagatggggtttcgccatgttgccaagctggtctcaaactccttaccttgtgatccgtccgcctcagcctcccgaagtgctgggattatagtcgtgagccaccgcacccgggcttttttttttttgagatggagtttcattcttgttgcccaggctggattgcaatggcatgatcttggctcactgcaacctctgcctcccgggttcaagtgattctcctgcctcagcctcccaagtagctgggattacaggcacccgccaccatacccagctaatttttgtatttttagtagagatagggtttcaccatgttggccaggctggtcttgaactcctgacatcaagtgatccacccaccttggcctcccaaattgctaggattacaatcatgcccggccaattccactgtttttggaatggaatataaccaggttttgtatggctataaccatattttatttatgcattcatcaattgatggacatttggggttgtttgccaaatgtttttgactgttataactactactgccatgaacattcgtgtagaagttttatgtgaacacatgtttatacttctcttgggtatatacttaggagtcaaactgctgagacatatggtaactacatgtttaacatttttaggaactgccagactgtttttggggatgactgcaccatttcacattcccatcggcaacgtacagttgacccttcatcaacaaaggcttgaacagcataagtccatttatacgtggattttttttttttttttcagtaaaagttatggctgtacgtggtggctaacgcctgtaatcacagcacttcgggaggtcgaagcaggcagatcacctgaggccaggagttcgagagcagcctggccaacatgggagagaccctatctctactaaaaaaacaaaaaaacaaaaattagccaggctgggggcacactcctgcagtccccagctactcaggaggcggaggcaggagaatcacttgaacccaggaggcagaagctgcagtgagccaagatcgtgccactgcactccagcctgggcgaaagaggaagactctgtctgaaaaataagaataagaccaggtgtggtggctcacgcctgtaatcccagcactttgggaggccaggcaggataatcacttgaggtcaagagttcaagaccaaccaaccaacgtggcaaaaccccatctctactaaaaatacaaaaattagccaggctccttttgccggtggcggcaagcatggagaggatgccatgaaggcctcgggcacactacaagagtacaaggtggtgggttgctgcctgctcactcccaaatgccacacaccacccctctaccacatgcgaatctttgcacctgatcatgtcgttgccaagtcccacttctggtactttgtatctcagctaaagaagatgaagaagtcttcggggagactgtcaactgtgggcaggcattcgagaagtaccgcctgcgggtgaagaacttcggcatctggctgcgctacaaactcccagagcagcacccacaacatgtaccaggaatattgggacctgaccaccacgggcgctgtcacccagtgctaccgagacatgggcgcccggtaccccacctggacccattccatccagatcatgaagatggaggagatagcagccagcaagtcccaccggctggccgtcaagcagttccaagactccaagatcaagttcccgctgccccaccaggtcctgcgccatcagcacaagccacgcttcaccaccaaaaggcccaacaccttcttctaggggtagggccctcacccaggtgtgccccacgtaaactcaggaacgccccggtaaaaaaaaaaaaaattagccagtcatggtggtacatgcctgtaatcccagctactcaggaggctgaggtgggagaattgcttgcacctgggaggcaatgttacagtaagctgagatcgcgccactgcactccagcctgggtgaccgagtgagactctgtctcaaaaaaattaattaattaaatttaattaaataaaagttacaactttaaacactgaggggctagtaaaaagaaaaaaggtcgggcacggtggctcacgcctgtaatcccagcactttgggagggtgaggcgggtggatcacgaggtcaggagatcgagaccatcctggttaacacggtgaaaccccatctctactaaaaatacaaaaaaaatagccaggcgtggtggcaggcacctgtagtcccagctactcaggaggctgaggcaggagaatggtgtgaacccgggaggcggagcttgcagtgagctgagatcccaccactgcactccagcctgggtgacagagtgaaagaaaaaaaagttacagctgaatgtgcctgcctctccatctacctcctccaccacctcttctgcctctgccacccctaagacagcaggaccaacccctcctcttcctcctcctcctcagcttactcaatgtgaagacgatgagaatgaagacctttatgatgatccacttccacctaatgaatagtaaattcaatgtgttttcctgattttcttaataacattttcttttcttcagcttattgtaagattatagtattatatatatatataacattaaaaaatatgttaatcaccctttccctgccactgccgagttgcgcggaggcggaggcttgggtatgttcaagattcagcttcacccataacccactgccatggccgagggaggcattgctgctggaggtgtaatggatgttaatactgctttacaagaggtgctgaagaccgccctcatccacgatggcctagcacgtggaatctgtgaagctgccaaagccttagacaagcgccaagcccatctttgtgtgcttgatccaactgtgataagcctatgtatgtcaagctggtggagtccctttgtgctgagcaccaaatcaacttaattaaggttgatgacaacaagaaactaggggaatgggtagcgctctgtaaaattgagagaagggaaaccctgtaaagtggttggttgcagttgtgtagtagttaaggactatggcaaggagtctcaggccaaggatgtcatccaagagtacttcaaatgcaagaaatgaagacataaatctttggctcacataaaaaaataagttaattgactgttatgtaatcactgagacctctggacaacagtgggctattagtagttaagattttttgttttgagacaggatctcactctgttgcccaggctggagtacagtggtatgatcatggctcactgcagacttgacctcccaactcaagcaatcctcccaccactgcctcctgagtagctgggattacaggtgtgcgccaccacactcaactaatttttacaatttttatagaggctgggtttccctctattttccaggctgatctcaaactcctgggctcaagcaatcctcccacctcggcctcccaaagtgctggaattacagaggtgagccactgcacctggctggattttgggggtgtcaaaagtagcctggcagggtggctcacgcctgtaatcccagcactttgggaggccgaggtgggcagatcacgaggtcaagagatcgagactatcctggccaacattgtgaaaccccatctctactaaaagtataaaaattagctgggcgtggtggcaggcgcctgtagtcccagttactcgggaggctgaggcaggagaatcgcttgaacccaggaggtggagtttacagtcagccgagattgcgccacactgcactccagtctggatgacacagcaaggctccgtctcaaaaataaataaataaatagagcaccccactgaaggctgggcacagcggctcatgcttcttatccactttgggaagtcagagtgggaggatcacttgagcccgggagatcaagaacagcaaaaagaaaaaaaaaaaagaaagaaaaaaaataccagctgggtgtggtggcactcatttgtagtcccagctactcaggaggctgaggtgggacgatcacttgagcccagcagttcaaggttatatgagctatgattgtgctaccacactctggcttgggtgacagagtgagaccctatctcaaaaataaaaaaataaaaaataaaaagcactctggccaggcgcagtggctcatgcctgtaatcccagcaatttgggaagccaaggcgggtggatcacaaggtcaggagttcaagaccagcttggccaagatggtgaaaccccgtctctactaaaaatacaaaaattagcgggacagggtggcgggcgcctataatcccagctactagggaggctgaggcaggagaatcacttggacctgggagacagaggttgcagtgagccgagattgcaccactgcactccagcctgggcaacagagtgcaacttcatctcaaaaaaaataaataaataaaaataaacataaaaagcactgcaatgactttcatatgcacctaggattaagaccttaatttaaattttcagggccaggctcggtggctcatgcctgtaatcctagcactttgggaggccatggtgggaggactggttgagcccaggagtccaataccagccctgacaacatagccagacactgtctctataaaaaaatttaaaaattaaccaggcatggtagtatacacctgtctgtgttctcattccttgggaggctgaggtgggaggatcacatgagcctgggaggtccaagctacagtaaaccaagttcatgccacacactccagcctgagcaacacagcaagaccctgactcaaaacaaaaaaacaaaaacaaaaacaaaaaaactacagctacttaaagtgtgttctagggactggcagtgtcagcaacatttggaagtttattagaatagcaaaatttggccgggcatggtgactcacgtgtgtaatcccagcacgttgggaggtccaggccagctgatcacctgaggtcgggagttcgagaccagcctgaccaacatggagaaaccctgtctctactaacaaaaaaaaaaaaaaaaaaatacaaaattagccgggtgtggtgtatgcttgtaattccagctacttgggaggctgaggcaggagaattgcttgaacctgggaggcagagcttgtagtgagccaagagcacaccattgcactccagcctgggcaacaagagcgaaactccatctcaaaaaaaaagcaaaatctcggccctatcccagacctactgaactggaatctgcatttttttttttcccaggcggagtcttgctctgtcgcccaggctggagtgcagtggtgcaatcttggctcactgcaacctccgtatcctgggttcaagcaattatcctgcctcagcctcccgagtagctgggattacaggcacatgccaccatgcctggctaatttttgcgttcttagtacagacagggtttcaccatcttgtccagactggtcttgaactcctgaccttgtgatccacctgccttggcctcccaaagtgctgggattacaggcatgagccactgcgccaggcccaaatctgcattttagcgagtccctggtatctcctgtgagcattaaagtttgagaagtggtgatctgtgtgctgatggctccccaatgttcacctcaatccctgggccccagcctttatacctaactgccactttggcatatacccagccatctcaaacataatttgctccaaactgatatccttgcttaaacttgatcctctccatcctatccaatcgcaccactactactggccattcaggctacaaacctaggagacatttctgagtccactatgtccctcactctcctattcaatccatcaactagtctaggtgactacttccaaatccatcccaaatgcatctctttctatctgaagccaccacctcaatctatgacttggatacctatcaagcctcccacttttgcccttcctgcctccagtcagttctccccactatggccagagggagctttttttttttttttttggagacagagtctcactctgttccccaggctggagtgcaatggcgcatctcggctcactgcaacctccgcctccccagttcaagttggttctcatgcctcagcctcccgagtagctgggactacaggtgtgtgccaccacacccagctaattttttgtattttagtagagatggggtttcatcatgttgctcagggtggtctcgaactcctgagttcaagcaatccacccatcttggcctcccaaagtgctaggattacaggtgtgagccaccacacccagccagagggagcttttaaactaaaattaggccaggcgctgtggctcacgcctgtaatcccagcactttgggaggctgaagcaggtggatcacaaggtcagttcaagaccagcctggccgagatggtgaaagcccgtctgtactaaaaatacaaaaattagccaggtgtggtggcaggcacctgtaatcccagctattcgggagcctgaggcaggagaatcacttgaacctgggaggtggaggttgcaatgagccaagattgtgccactgcaccccagtctgggcgacagagcgagattccatcgctaaataaataaataaatcaactaaaattagtgatttctgcctaaaatcgctaacggcatatcacacttaaaatcagagactgggcacactggctcatgcctgtaatcccaacactttgggagaccaaggtaggaggatcacttgagcccagggattcaagaccagcctgggcaacatagagagaccccatctctacaaaaaaattaagaattatccaggcatggtggtgaatgcctgtcatctcaggtactcaggagactgaggctggaggatcctttaaggtcagtagttagaggttgcagtgaaccatgactgcacttgtgaatagccactgcactctagcctgggcaacatactgagatcctgtctctaaaaataaataaatagccagggagcagtggctcatgcctataatcctagtgctttggaagtccaagtggggaggatcgcttgagcccaggagttcaagaccagcctggacaacatagcaggacacgatctttacaaaaattattttaaaaaattagctggacctggtggtgtgcacctgtagttccagctactgggaaagctgaggcaggagaatcacttgagccatggagtttgaggctgcagtgagctatggagtgcactgcaccactgcactccaggcttgacgaacaagtgagatcctgtctctaaaaaataaaaataaataaataaaatcagatagggtctacccctctaaactcaactcctaccactggcagcttcagctacactgtttctgaaagaaactaagtttatcccatctcagaacctttgtacttgcttttctctctgtctagagctttcttcctccagatctgcccacagctgtctctggtcatttcaatgaaaggtcttctttgaccatctcccattccccacattctaaaagccctcatcaccctattaatttttgtttcggagacagggtcctgctctgttgcccaggctggggtgcagtggcacaatcacggctcactacagcctcaacctcctgggctcaagcaatcctcccacctcagcttcccgagtagctaggactacaggcgtgcaccactacgcccagataattttttgtagagaacagggtcttgctatgttgccaaggctggtctcgaaactcctgggctcaagcgaaattcccgacaccattaacgcatttttagtaacttatcagtatctgaaatcacctgtttcgtttatttctaatttgttcaaagtctggttcccccaggagatgagagatttttatctatcttcctcattgctgtgtctccagcaccaaggacagtgcctggtatatgacagatgcctaacgagtaacaactgaacggaaacaagcctcaatttcaaaaaaacacctataaatctgaaccccgaggtatggtgtacgtacaacagctttgaaaccggctgccaggattctgggtctcttgggggaaaaaggcagacgcggattccaaatcctgcccggttgccgacttgcggcgtgacctctcgcgaggtcatctgcaaaatgggagactgggggcgtgaggcggctggcacaagacaggcggcctttcccagcgcgtccccgcccccactacgaaaggtcatggcgccctggccctgcagctgggtccctccagggctgccctctcgcgctgccgggtcctgaagggcccgcctgcagcccagcagttcgcgttcgcctacccgcgcgcgacctacctactcacgcggccagccgcggactccaggccagctctgtcttgttgctgggcgctgccatattggcccagagagcgtccgggtcagggagctccagggaggtagcaaatcaagaaagctggtgtaataggtcccgcccacaacgcgaggtgggccaataggaaggcggaaggatctgggacccgcctcataacgagccaggcccagcctctaatgaggcaagacgcactccagacctgggaaccttgaaatggcccgggaggctggacttgggagtcatagtctatgaatccagtcgcaggccccagcggctgaaatgagaaaatgaattaaaaaaaaacaaaaagtgaaagggggccggtacggtggctcatgcctgtaatcccagcactttgggaggccagaagttcgagaccagcctgggcaacatagcgagacccccttatctacaaaaaatttaaaaattaactgggcatgatggcgcatgctcatagtcccagctattcgggaggctgaaacgggaggatcgcttgagccctggaggtcgaggctacagcgagccatgattgcacccctgcactccagcctgggcaacagagtgagaccctgtttctaaaaatagtaataataaataaatagggcagggcgcggtggctcacgcctgtaatcccaacactttgggaggccgaggcctgcggatcacctgaggtcaggagttcgagaccagcctggccaacatgatgaaaccccgtctctactaaaaatacaaagttagcagggcatggtggtgggtgcctgtaatcccagcttctcgggaggttgaggcaggagaatcgcttgaacccgggagacggaggttgcagtgagccaggataacaccactgcactccagcctcagcaacagagcgagactctgtctcaaaaaataaataaataaataaaaattagtggggcgtggtggcgtgctcctgtgatcccagctactcgggaggctgaggcacgagaattgcttgaacccaggaggtggaggttgcagcgagccgatatagcaccactgcactccagcctgggcgacagagtgagactccgtctcagtaaataaataaataggaaggcctcagtgaggtgtcctttgagtaaaggccggaggaagtgagtgagccatctggatatctggggaacgcttttggcactgggaacaacagcaaagactctgtgtggtcggagtggagtctttggaggaaatgggataaaacgaggtgagattgagtaatgggggctcctggtctcccccagaaagcaccagatttaggctgttaataactaaggtggataagcacataaaatgggctattggcaataacagtgtcccccgggaaggaaggctatctgccctcataagcccatttctgcagtccctcagcctctgtggcgcagtgagctggcatggagactaggatgcaagaacctacccttaggatgcctcaaggactctgcgcagccgcaggacatccacctcatcagaactcttgtgattgggcaatctgagaaaacctgtagccaatcagctgcttggctggagcactcctctctggcaagttgacaggcacgtgggcagcggctgggagcgctactgccctctgccaggctcccgcagctacaagcaagcagagtcagctctgcttagctggggagtgggtaagatgatggggtcgctgacctggctgtggccttcagagttattggtgtccttctcttgaggtggtcatggcttttgttttcttatttatccttccagaactagtcttttaatattttattttattttattttattttatttttggagacggagtctggctctgtcgcccaggttgcagtgcagtggtgcaatctcagctaattgcaacctccgcttcccacattcaagcaattctcctgcctcagcctcccgagtagctgggactacaggcgcatgccaccatacccggctaatttttgtatttttagtagagatggagtttcaccatgttgcctaggctggtctccaactcctgggctcaagcagtcctcccgcttcagcctcccaaagtgtcagaattacaggcattagccaccgtgcccagtcattattattatttatttatttatttattttttgagacagagtcttgctctgtcgcccaggctggagtgcagtggcacgatctcggctcactgcaaactccgcctcctgggctcacgccattctcctgcctcagcctccccagttgctgggactgcaggcgcccgccaccatgcccagctaatttttttgtatttttagtagagacggggtttcactgtgttctccaggatggtctgatctcctgaccccgtgatctgccagcctcggcctcccaaaatgctgggattacaggcatgagccaccatgcccggcctattattattattttaaaatagagatgggatcttaatatgttaccaaggcttgtctcaaactcctggggtactgcgatccacccatcttggcctcctaaagtgctgggattataggcatgtgccaccacaccaggccagtagtcttttaaaaacaagtaggtacaggccgtgcgcggtggctcacgcctgtaatcccaccactttgggaagccgaggcgggtggatcacgaggtcaggagatcaagaccatccagcctaacaaggtgaaatccagtctctactaaaaaaaatacaaaaaattagccaggcgtggtggtgggcgcctgtagtcccagctactcgggaggctgaggcaggagaatggtgtgaacccgggaggcggagcttgcagtgagccgagactgcaccactgcactccagcctgggcgacagagcaagactccatctcaaaaaaacaaacagacaaacaacaacaaaaaaaccaagaatgtacatattttatgtactgtatgtattaacacagaacaccatatgtgaggccctggtgcagaatctttaacattacagtcccagaaagaaccctataaaaagtagtagcttcacagtgaaagatcctagcagacaccaccttaaccaagggaccaacatttatatcaccagcaatgagtcatggtgatatcatgaagcccttggtatgacacacttagaaggatacatcatcacctctctggtattcttcctggtaatgcaaacacctcagtttattcaagacaaaccaaactcgaagacagtctacaaaataactgaccagcactcttcaaaagtgtcaaggtcctgaaagacccagggactattatagactgtaggaatgtatggagatatgacaattaaatgcaatgagggccaggcacagtggcactgtagttctagctatttaggaggctgaggcaggaggatcacttgaacccaggagttcaagtccagcctgggcatcatagtgagacctcatctctaagatagatagatagatagatagatagatagatagatagacagacagacagacagacagacagacagacagaaagaaagaaacgcaatgggccggatgcggtggctcacacctgtaatcccagcactttgggaggccgaggcagacagatcacaaggtcaggagttcaagaccagcctgaccaacatggtgaaaccccctgcctcagcctcccatgtagctgggattataggctcccaccattacgcccagctaatttttgtagtttttgtagagatggggttttaccatgttggccagggtggtcttgaactcctgacctcaggtgattcacccgcctcagcctcccaaagtgttgggattacaggcgtgagtcactgcacccagctggagtccccactcttaaccacagcgctacagtgtcttcatttagttgaaacaacatgctatatgttttaacttcaactttgtctatctcccttgtcccaggttgatgggatttatagtgatttattatgacaaggccactgcaataaatgttcctgtacatatgtcattcttcacacctacacttgtacttctgaggaatattctaaaatagaggatatacttgttcagaaggtaaggacatttgtcatttgggaaactatcaacaaattgcccacactcatcaacaatgttcccacagcctcctctgcgttacatgttgtcaagcattcttttatttatttatttatttatttatttatttatttatttttttgagacagagtctcgctctgtcgcccaggctggaatgcagtggcacgatctcagctcactgcaagctctgccccacagcttgacgccattctcctgcctcagcctcccaagtagctgggactacaggcgcccgccaccacgcccggctaattttttgtatttttagtagagacagggtttcaccatgttggccaggatggtctcgatctcctgacctcgtgatccgcctgccttggcctcccaaagtgctgggattacaggcgtgagccaccacacccggccgtcaagcattcttttcttttcttatttatttatttttcacccaaactaaaatgcaatggcatggctggacacagtggctcatgcctgtaatcccagcactttgggaggccaaggcaagcagattacctgaggtcagtagttcgagaccagtctggccaacatggtgaaaccccatctctactaaaaatacaaaaattagcccggtatggtggtgggcacctgtaatcccagctactcaggaggctgaggcaggataattgcttgaacctgggaggtggaagttgcagtgagctgagatcatgccactgtactccggcctgggtgacagagtgagattctgtaaaaaaaaaaaaaaaaaaaaaaataagcagtgtcatgatcatagctcactgtagcctccaactcctgggctcaagcaatcctcctgccttgccctcccaaaatgcacttttttaaaaagctctctctcttttttttttttttgtagaggcagggccctgccatgtctcccaggctggtcttgaactgctggcctcaaacaatctgcccatcttggcctcccaaagtgctggaattacagacacgagccactgcacccagactataagtgaacagctccctccctgtccacccactcacagtcagtctgggggtgagagatgctattattttacagcaggtggtcagggaaggcctctctgagaggtgatattagagcagagactgaatgaagttggggagaggccatgcaggcatcttgcagaaatgtgttccaggtggcaggaactgctattgtaaagaccctgaggtgggaacatgtttggggactcaagaaacacatctgtagcccagcgtggtagcgggtgcctgtaatcccagctacttgggaggctgaggctccagaattgcttgaaaccaggaggtggaggttgcagtgaaccgagatcatgccactccaacctgagcgacagagcgatactctgactcaaaaaaaaaaaaaaaaggagaagaagaagaagaaataaggagaagggagaagagagaagggagaaggggaagaaggagaaggaggaggagaaggaagaaagaagaaagaagaagaaggaggaggaggagaagcagcagcagaagaagaggaagaagaaggagaacaagaagaaaaagaggaagaggaagaagaagaggaagaagaaggagaaggagaaggagcagcagcagcagcggaagaggaagaggaagaaaagaaagaagaaagaagaaagaaggagaaggagaaggagaagaaagaagaaagaagaaagaagaagaagaagaagagggagaagaagaagaagaaacagcacatctggagggacttggaagaaaaggtacaaacagtgttacctgggagggtggcttggcttctctgaaccttgagtttcccatctataaaatggacctatgagtttctaccctcagaaggtgatggtgaggattaaaagagattgtggctggcatggagtgagtgttcccataacagaagcctttaggaacaagagcctctgccagatttctggataggaaagcttcgtgaggagggagcttgcagagcaggatgccaagataggccggtgcagagcagggctttgactttccccaaaacacacagacaaacacgtgtgagtgtgggttttatttttatttttacattttttgagtcagagtctcactcccgtggcccaggctggagtgcagtggtgtgatcttggctcactgcaacctctgcctgacatgccgggttcaagcaattctcctgcctcagcctcccgagtagctgggattacaggcatgtaccaccatgcccggctaattttgtatttttagtagacacggggtttcaccatgttggtcaggctggtcttgaactactgacctcaggtgatccacccgccttggcctctcaaagtgctgggattacaggcgtgagaaaccacgcccggccaagtgtgagttttaaatggttctgagcatcaggaaggttttagggggtcccctgaagttgaggagaggcatggctttcctacaatgactgtcctagacccttcgggaaaccgtgcctcttacaagatcctacacttctcatttagatggtaaactgaggcacagaggggctagagcctggaaaatgccagaaaggagcgaataagggatgacactcgggtgtctactgggattggggcctcgatatgggatcagccccctctaatgcctctacccccatctaccagacagagacgcgaagagagacggacaatacagcgacagcgacatgaagagaaacagaatgactcaaagaccaggcacagaaacagagacacagagacaaaggcagagacagaaaaaggctcagcgacccagagacggagatacagagacacagacctactacaatcagagggacaaggcagtccccgaaagggctgccccctgggggtacccggggctgccccgttggggggcacgccaagagctcccccaccccgcccccgtcgtgcctgggccgtgacttcagagtccgtgcagattctataaatggccaagaggccgcgggccggggggcggggccgagtgagtcatcgcgtgacgtcaccgccgcctggacctcgccaggtcccgcccccgcccctcccgggccgccagggggcgccggctgcaggtcctcacatgcgcagtagcgaactgcggcccccgagggccgctcagtttgggagggatccaggaatctgcgcgttcgaatcccgcccctgccaccctcgagctgtgtgacccggccattcggcgtcacctctctgtgcctcgtatagacccacctcataaggctgtcgtgaggaatgagttaacaggctcaaagctcttagtacgtagcaggtgctaattgttagctcattttatgtactttctattttttcttttttttttttttaaatagagacggggtctcgctatgttgcctaagctggtctcgggtctcgaactccagggctcaagcgatcctcccgccttggcctcgtattttatgtattttcgtgtatgttcaacatatcatgacatgccatcaactagcacattgccttagctcagtggttggcaaacaggggtgatctgcttccaccccgaccccaatcatgggacattggcaatgtgtgtagacatttcttcttttaatttttcttttttagagaccatggtcttgctatcttggccagatggttctcaaactcctgggctcaagggatcctcccacctcagcctccttagtagctgggactacagggtcctgccgcagtgcctcaacatttctgtttattaggactaagagagtgctactggcatgtagcaggtagaggccaggcatgctgcttgaagtcttacaatgaatgcccaaggcagccccccaaccatgaagaattatccagcctcagctgtcaacagtgtggaggttgagaaaccccaccttagcctcatagttgaggttcatggagcatggtctcaaattctcctctgcccctggcctgctgtgtgacgctgaaaaagtgattccaagcccccgtgcctcagtttccccacctgtaaagcaaagtacttgtattaataataacagtgtcagctgggcacggtggctcacgcctgtaatcccagcactttgcaaggccgaggtgggcagatcaactgaggtcaggagttcgagaccagcctggctaacatggcaaaaccccgtctctactaaaaatacaaaaaatagccagtcgtggtggcagacacctgtcatcccagctacttgggaggctgaggcaggagaatcgcttgaacccaggaggtggaggttgcagtgagccgagatagcatcactgcactccagcctggggaatagagactctgtctccaaataataataataataataataataataataataacagtgtccatctctgagggcgtcatgagaattgaatggatatatgtacagagttggaacatggcctgacataagggctgtagtctgtggcatattgcagccatgccattagcatgtgaccgataaactgcatatcctcaacatatcattagtgtgtggcaggttgcagacatgtcatccaagtgtcacaaacatggccttgccatgtggggcatgatgtgggcatagcatccacccctgtggtccaggggtgagatctggctgggtagggctgtttgacagggacacagttcacggcctgggacttgccaacaaagtcaccctgtagttcaggtgacacacaagtggatggggagggtgagacccaggatctcttctcccccaggtccttatgaggggctggaggagacagaactggggtgctggaccctcagcataaagaatgctataggctgggcatggtgactcatgcctgtaaatcccagcgttttgggaggccaaggcgggcagattgcttgagcccagaaatttgagaccagcctgggcaacatagcgagaccccgggcaacatagcgagaccccatctctaaaaaaataaaataaaattagccaggttggtggcacaagtctgcaattctaactacttggatgggctgagatgggaggatcacttgagcctgggaggtcaaggctgcagtgagctgtgattgtgccactgcactccagccgaggggacagagtgaaaccttgccttaaaaagactgctatggcccgagtccctctgctgtgccgggcactgtgctgggcatgtaacaggcatattcttctgatctttacaactctcccatgaggcaggcactatcgttagcccattttacagatgtggccatagaggcccagagaggagaaggggcttacctaaggctatagactgttggtatctggagataaacccgggatggtgctcactaaactaccttgggtgtcagtcctgcttcaagactccagagagataaagagagatgacctcagagacaaagagactcagacccagccagaggcccaatggacagtgggaggggtgggtggaagaaggctggtctctgtctgaccaagcccccccagaataacgcaggctgcccccctaggtggaaacaatgacacaatcagctcccaataccaagggcctgacatcacaaggggaggggaaggcagctgaggttgtggggggaggtgccccgccccttggcaggcccctacagccaatggaacggccctggaagagacccgggtcgcctccggagcttcaaaaacatgtgaggagggaagagtgtgcagacggaacttcagccgctgcctctgttctcagcgtcagtgccgccactgcccccgccagagcccaccggccagcatgtcctctgctcacttcaaccgaggccctgcctacgggctgtcagccgaggttaagaacaaggtagggctggagggcctccctggcctggcccacacgtcctgccaggccagagccctgagcttggggtcccttgaaccccctcctgcctatcctatgtgacttggaaactgagaggggaaaagggagtgatatgggataggggctgcctgtctccccctgaacatcccggagcccccagctatggttggggctggaatgggggggcacacagccacacataaacagagggggtcagtccattgcaaagatacccacctgatcagtcttctgttaacccttcgtgttcttggggggaacaacatagggggaagacttgttgatttttccatatcccccggcctgacaaagaaattggggagcgcttgagtgctggggtacctgggaagtgacgccgtgaaagtgtgggagatcctgaagacagagggggacggtgaaaggcaggaagcgggcatcagaagtgcggcaggggtctcctgactgtggagctaggaagatacctggacaccaccttcatgctatggttgggtaaactgaggttcggagaggagaggcaaatagctggggtcccaggtaaagcaggtacagcgctcggaccctggactcaccccccatacaccaggatgggctcagcttctcccagctggagaactttaagtttccagcccactggaatcgccccaacagtattgccgagggaggagttcctgccccatttgacagaggggaacactgaggctcagggtggcttttcccagggtcccatggtgaggaagtgggggactgggttggaacctgggtcgagggatctcggggctggaggagggggctggtggggggcgggtcctcgggcgagagacagatcccagcgccgccctcctcccccccagcgccggccccagagccgcgcagagccgcgcagagacgccgcgccttataaggcggcctcggggagcccgggccacgctatataagggccggtttgctttataaagccgggctggtggcgtggggggcggcagggccagggccaggtgagggggccgcccctcccacctccccccactcacccgggagaagaagaggcagcccggtcccctaggggctgggagcctggctgggcttgggcggagggttctggagaaatgggagtggagtgggggaggggggggacagtggagagagggaaaagcagggaggtggggggagaggcagacagagatactgggagcctgagacaccctagggacagacgggggagggcgagccaggagcgagataagacctagacaaggatggaggggcagggagaggagacagagccccaccacccccaccccaggcaggaaacctggagacagagaaagacctagagaggcagatatacaagacccaggagccctacccctggccagacagggactagccacctagagagatggggacccaagactgggccaagaaaagacagcgctggggaagagagagacagaggagtcggggggataagagggagagagacatacagacgtgcaaggggtgggggctaagacagagacaagcccccaccactaaccagagacagagccctggagctgaagacctgggggacacggagagacagagatgtatgaccagcactcctctgcaagccagcacccagggacacctccttagacatccttcttcccttcctgaggtgccctctcttccaacagggggcacagagggggcagggctagaggaagagaagccccaagtttggcctgggcgaaaaaccagggtgccgggtgccacccctctagctcagaggatccagctccccacaccccacccctcatctacattccctggtgccaaacctcagaatgcccggaatggccccctgggcaggtgccacctcagccctggctctcagcccgccccagcccccatcccccaactatggatctggggcaaaattgccttagttgggaaggacgagggagatcaggctctaggaagttcagacaggacccagggagcccaggctgcccccaatgcatcctcacccctttctctgtgccccctgccctcccctcgccccagctggcccagaagtatgaccaccagcgggagcaggagctgagagagtggatcgagggggtgacaggccgtcgcatcggcaacaacttcatggacggcctcaaagatggcatcattctttgcgagtgagtgaggctctcgaagccgagaccctgcaacatcccccaactccatgcagcccctcaacccccaaaacaaccatgatcctggaactgagttgaacactttctattggatacctttggggtggccagtaatcattgtgcccatttaacaggcacagaaaactgaggctcaggtgaaatgcattgcaccaagtcccacgtggtttcaagggaaatgactctagaatcttaaccaccatgctatatagggtaggcccatctgtggccgccagagtccccagaaagagcggtcacagctaaaaggcagcagccaacagctgttcatggctggcttggtgatgtgaggagagatgtgcagcaataattaaaggaggccctggttttctttctgttttctttttgtttttttgagatacagtcttgttctgttgcccaggctgcagtgcagagacacaatctcggctcactgcaacctccgcctccagggtttaagtgattctcctgcctcagcctccccaatagctgggattacaggcacgcaccaccatgcctggctaatttttgtatttttttaaagtagagatggggtttcaccatgttggccaggatggttacgaactcctgacctcaattgatccacctacctcagcctcccaaagtgctgggattacaggcacgtgccaccatgcccggttaatttttgttttttttttttttttttcagtagagatggagtttcaccatgttgactaggctggtcttgaactcctgacttcaagtgatccacctgccttggcctcccaaagtgctgggattgcaggcacatgccaccacgcctggctaatttttgtattttttttttttttttttagtagagacagtgtttcaccatgttgaccgggctggtctcaaactcctgacctcaagtgatccacctgcctcggcctcccaaattgctgggattacaggcatgagccacctcgcccgaccttcttcttcttcttcttttttttgagatggagtcttcctctgtcacccgggctggagtgcagtgacatgatctcagctcactgcaacctctgctttccgggttcaagtgattcttgtgtctcagcctcctgagcagctgggattacaggtgcccaccaccttgcccggataacttttgtatttttagtagagacgggattttgccatgttggcctggctggtctcgaactcctgacctcaagtgatccacccgccttagtctcacaaagtgctggcattacaggcatgaaccactgcaccctgccggccctggttttctcctcgcctcaaaacctcattgctgagggaggtgaaaaccctaacagctcccaagccccagttccactgcaatcttttttttttttttcagatggaatcttgctttgtgacccaggctggagtgcagtggcatgatcttggctcactgcaagctctgcctcccaggttcaagcaattctcctgcctcagcctcctgagtagctgggattacaggtgcccgccaccacgcccagctaatttttgtatttttagtagagacggggtttcaccatgttggtcaggctggtctcgaacccctgaccttgtgatccacccacctcggcctcccaaagtgctgggattataggcgtgagccaccgcgcccggctccactgcaatcttaatgcatagcagggccctaaacccagcctgcgcccgatctgcatttgagtctgacccagggcagagtgactgtgagtggcctcgggaagactttgaaggtgcagcttcatcaagtcctagatgctgggaagaaggggtgtggggggtgtttaccttgttccattcccatccactaggaacaaggaattggcaggtggggaggtaggcatgctggtgtcccagctcaggcagaggactgctcagacgtcaaacagtgcagtcccagcctgggcaacatagccagattccatctctacaaaacatttttgttttaattagcttggcatggtggcatgcgcctgtggtcccagctactcggaaggctgaggtgggaggatcgcttgagccctggaggtcaaggctgcagtgagctatgatcgcgccactgcactccagcctgggcaacagtgaaaccctgtctcaaaaaaaaaaaaactaatgtaaacgacaagttgatgggtgcagcaaaccaacatggcacatgtatacctatgtatcaaacctgcacgttgtgcatgtgtaccctagaacttaaagtataataataataataataataataataaaagagtgggccgggcgcggtgactcacgtctgtaatcccagcactttgggaggctgaggcaggcggatcacgaggtcaggagatcaagaccatcctggctaacacggtgaaaccctgtctctactaaaaaaaatacaaaaaattagccgggcgtggtggcaggcgcttgtagtcccagctactcgggaggctgaggcaggagaatagcgtgaacccgggaggcggagcttgcagtgagccgagatcccaccactgcactccagcttgggtgacagagcgagactccgtctcaaaaaaaaaaaaaaaaaaaaagacctaatgtaaatgacgagttgatgggtgcagcaaaccaaaatggcacatgtatacctatgtatcaaacctgcacatagtgcacatgtaccccagaagttaaagtataagaaaaaaaaaaagagtgtagtgcagtcacccacgcactccggtcattcactcattcattcattcattcattcacaaaagaagcatttatgagttcctgctgtgtgccaggctctggcctaggcactgggaacagtgaacagaacagactcgactcagagctcaaggacttttagtccagttgaggagatcaatcatataattgatcaaataatcacagatttgtggtcgtaagtgtcctggggaaaactcaagcggaagggaagatgggagggtcaggtatatgtctgcgggtggagagtctgcagtttcctagagagtggtctgggaggcctctctgaagaggtgacatttgaacagaaccttagatgaagtgagggagggctcaggggacctgaggcaaagcagagggggccaccagtgcaaaggcgtgaggtaggatcgtgcttggggtgttcaagaaacaagaaggaggctggcgtgacgagcaccaaatgattgagcagaagtggagatgaagtcgcagagtgaactgagagtcagatggtggagggcattttatttcatttatttatttagagacagagtcttgctctggtgcccgggctggagtacagcggtgcaatcatagctcactacagcctcgacttcctaggctcaactgatcctcccaccccagcctcttcagccccagcctcctcagtagctggaactacaggcacacatcaccacgcccggtgaagttttcgggttttttttttttttttttttgtagagacacgggtctcaccatgttgcccaggctgatctgaaactcctaggctcaagccatcctcctgtctcggcttcccaaagcactgggattacaggtgtgagccactgtgcccagttctacagagggcattttaggcagaggacttaggatttcattctgaaggcaatgggaggctcctggaggatttggaactggacggtaacttgaactgtttaaaaaaggccattctgggccaggggcagtggctcatgcctgtaatcccagcactttgggaggctgaggtgggcatatcacttgaggtcaggagttcgaaaccaacctgaccaacatggtgaaaccgcgtctctactaaaaatacacaaaatttagctgggcatggtagcaggcacctgtaatcccaactacttaggaggctgaggcaggagaattgcttgaacccaggagacagaggttgcagtgagccgagatcccgccactgccttccagcctgagtgacagagcaagactccatctcggaaaaaaaaaaaaaaattctggctgctggatgaagaagggtgggtctgtaggggatgaagtggaagttgggagctcattacaagaggccaggaaacagactctggtggctgagacccaggtggaggtggcggggagcagtgggtggttttctggactcattaaaaggcagagccaaagaactttggagggactggacatgaggctgagagaaggagaaagggggagttgggggcaagtccaagggctctggctgagcacctagaagggggcactgctaggcagggaaggtggagggaggggggagtctggagggggaagctgcatgtcaggagtctggagcagggtgagtttgatttgagacacccaggcacccatggagagagctgaatgagatggtaagaaacccaagctgcagggagatgagggagttgctggcatatggaggcacttaaagtcaagacactgaatgaggccaggtgctgtcactcatgcctgtaatcccagcgctttgggaggctgaggcaggaggatcgcttgagcccaggagttcaagaccagcttgggcaatacaaatacagtgaaaccccctctctaccaaaaaaaaaaaaaaaaaaaaagccaggcatggtggtgcgcacctgtgatcccagctactcggaaggctgaggtgggaggatcgctggagcctgggaagttgaggctgcagtgagctgtgattgcaccactgctctccagcctgggcgacaaagccacaccctgcatcaaaaagaaaaaaaaaagaaaagaaaagaaaaaagaggcgagatcattaaaggagtgagtcagagaagaggcccttgtgggcttcctgctgtctacaagagaaaaggatgctgagacacgcctgccagtgaggcttcggagatcccagagactcggacacaccttggataagcaggctttctgactgggacctgagtctagctccttggcatcagtgtcccatttgtgtgtgtgcttgggtggtttggaggggctgcagctgagagctgactgcagggagaagtgacgctagggtatggcatggccccttgtggtcatcccgtcaccctcctcctgctgggctgggctggagagcgggagtgggggacacctttctttcttttttttttttttttgagacggagtctcgctctgtccccaagctggaatgcagtgctgcaatctcagctcactgcaacctccgcctcctgggttcaagtgattgcctcagcctcctgagtagctgggagtacaggcatgtgccaccacgcctggctaatttttgtatttttagtagagatggggtttcaccatgttggccaggatagtctcgctctcctgacctcgtgatccacccgccttggcctcccaaagtgctgggattacaggcgtgagccaccgtgcccaaccctggggggacacctttcttaccccttccccactcttctcagattcatcaataagctgcagccaggctccgtgaagaagatcaatgagtcaacccaaaattggcaccaggtgagcccagacacaatctcttccatccttgcccgcaagcccctcagacctcccctccccacccagtgaccaccacctgcccccctctagctggagaacatcggcaacttcatcaaggccatcaccaagtatggggtgaagccccacgacatttttgaggccaacgacctgtttgagaacaccaaccatacacaggtgcagtccaccctcctggctttggccagcatggtgagtgtggttgcaggctgggcagggggtggtgggcagcctgggctgggatgcaggtgtggccacttgtgctcctgagcccagtgaaggtggcggagcggggggcagggatcggggagcaggtgctgtcaacagcgtccaagggggccgggcgcggtcgctcacacctgtaatcccagcactttgggaggccaaggtgagcggattgcttgaggccgggagtttgagaccagtctggccaacatggtgaaatcccgtctctactaaaaatacaaaaattagctggacgtggtgacgcatgcctgtaatcccagctactcaggaggctgaggcaggagaatcgcttgaacccgggaggcggagtctgcagtgagccgagatcgtgccactgcccagcctgggtgacagagccaagactccgtctcaaaaaaaaaaaaacaaaaaacaaaaaacagtgttggccgggcacggtggctcacgcctgtaatcccagcactttgggaggccgagacaggtggatcacaaggtcaggagattgagaccatcctggctaacatggtgaaaccctgtctctactaaaactacaaaacaaaattagccgggcatggtggcaggcgcttgtagtcccagctactagggagactgatgcaggagaatggtgtgaagccgggaggcggagcttgcagtgagctgagatcacgccactgcactccagcctgggcaacagagcgagactctgtgtcaacaacaacaaaaaaacagtgtccaaggggactgtgcagcctggaggcccccttgtcagtccctgctttccctgccccacctaggcgaagacgaaaggaaacaaggtgaacgtgggagtgaagtacgcagagaagcaggagcggaaattcgagccggggaagctaagagaagggcggaacatcattgggctgcaggtaccgccctgtcctcactgcgcagaggtcatagaggccaggagggcaccctgatgtctgaaggcttttggggacaggatatttggcattaactatactataggccgggtactgtgcttatgctcatcttccattcacaaactcactcactctgccaacaccccagcagacaggtgcttgttatcaacataccctttccgcagatgagaaaactgagacccggagaagctggctcgcttttgcacagatcttccagctgatgcgtggcaggctggaacttcaatgctagaagtcagtcatgtgataggcccactctgggcctcagtttccagtctcgaaaggatgcctcaggcggggtgcagtggctcacacctgtaattccagcacttggggaggctgaggcaggaggattgcttgaggtcaggtgtttcagaccagcctgggcaaaatagaacccccctccaccgccatctctacaacaaatttaagagtttagccaaatgcagtggtgtctgcctgtggtcccagctacttaggaggctgaagtgggagaatcacttgagcccaggagttcaaggttacaatgattgcatcactggactccagcctgggcgacagagtgagaccctgtctctaaaaatgaaaatgggctgggtatggtggctcatgccagtaatcctagcacttcgggaggccgaggcaggcggatcacttaaagtcaagagttcaaggccagcctggccaacgtggtgaaaccctgtcactaccaaaaatacaaaaactagccggtgtggtggggcacacctgtagtcccagctactcaggaggctgaggcaggagaattgcttgaactcaggaggcagaggttgcagtgggccaagattgtgccgctgcactccaacctgggcgacagagtgagatgctatctcaaataaaataaaataaaacaaaaaaatagaatagaacaaaataaaatataaaaataaactaaaaaatgggccaggcacagtggctcacccctgtaatcccagcactttgggagggtgaggtgggtggatcacctgaggtcaggagttcgagaccagcgtggccaacatggtgaaaccccatttctactaaaaatacaaaaaattatccgggcatggtgatgcccacctgtgatcccagctactccggaggctgaggcaggagaattgcttgaatgtgcaagatggagatttcagtgagctgagatcatgtcactgcactccagcctgggcaacagagcaagactccgtctcaaaaaaaaataaataaaataaaataaaaattgaaaaaaatgataaagcggcgcctcatcctctcccatcagctatgcctcatggcccatgatgaggtctgtaattattggtgtgattctccttctggcttcctagatgggcaccaacaagtttgccagccagcagggcatgacggcctatggcacccggcgccacctctacgaccccaagctgggcacagaccagcctctggaccaggcgaccatcagcctgcagatgggcaccaacaaaggagccagccaggtgagtgggggcccccgggacacgccgtcaaggcccaggaccctggccaccccacggcctgaccacaccacccttcgcaggctggcatgactgcgccagggaccaagcggcagatcttcgagccggggctgggcatggagcactgcgacacgctcaatgtcagcctgcagatgggcagcaacaagggcgcctcgcagcggggcatgacggtgtatgggctgccacgccaggtctacgaccccaagtactgtctgactcccgagtacccagagctgggtgagcccgcccacaaccaccacgcacacaactactacaattccgcctagggccacaaggccttccctgttttccccccaagggaggctgctgctgctcttggctggacccagccaggcccagccgaccccctctccctgcatggcatcctccagcccctgtagaactcaacctctacagggttagagtttggagagagcagactggcggggggcccattggggggaaggggaccctccgctctgtagtgctacagggtccaacatagagccgggtgtccccaacagcgcccaaaggacgcactgagcaacgctattccagctgtccccccactccctcacaagtgggtacccccaggaccagaagctcccccagcaaagcccccagagcccaggctcggcctgcccccaccccattcccgcagtgggagcaaactgcatgcccagagacccagcggacacacgcggtttggtttgcagcgactggcatactatgtggatgtgacagtggcgtttgtaatgagagcactttcttttttttctatttcactggagcacaataaatggctgtaaaatctcctgaggcctcagagctgctctgttttagatatgcgccatatcccgcacacacatctgcacggacacacatgcccacatgcaccctaagacgtacatacacactcacacgcaccctaagacacacacctcactgtagccactcagctagacacaggacaggcaccccatcacactcacatgcaaagtccacacacacacacacactcccccctttcacacacagatatgcacacacaggcagtacacactccctacgacatgtaaaaaaggcatagccagccgggcacagtggctcatgccggtaatcccagcactttgggaggctgagatgggaggatcacttgaggtcaggagttcgagaccagactggccaacatggtgaaaccttgtttctactaaaaatacaaaaattagcagggtgtggtggcgcatgcctgtagtcccggctacttgggaggctgaggtaggagaatcacttgagccctggagatctaggctgtagtgagctgagatggcgccactgcattccagcctgggcaacagagcaagactccatctcaaaaaaaaaaaaaaaaaaaaaaggcacagccagagagccaatgcgcgcgcgcgtgcacacacacacacacacacacacacacacacacacacgacccacactgctctcccagaggcttgtggatggtggtgacaaagagcctgagtactgggacaggctaaatggcatgtgaatcacagagcagctgcctggatgacctcgggcaatcactttccctccctagacctgttttcccatcaaaataatggggacagtaagcctcttgtggtcatgaaatgacacccccagatggggtgatgttctacatgtttaatcgctggtaaagaccaggcatcaatagagaaaggatgacaagtaggggtcctggtgggccctgtgggcagggtgaaccctttagccccagactgtggggaggggaaaggggacagggagaggggcacttctgagccaaggcaatggccctttactgactggcacagggcaccatagggcacggttaattctgtgcgccccgcccgctctcagccgtcttaaggctgagcctgccaacccgggactctaaaaggctgtgtccagggcctcaacctcctcacatttcagaggggaccctgttatccccgggaggagggagaggtccccaaccatcaggattccaaggaggagaggaggcagagaagcgaggagcgcggcacggagctgtcttctccccagggagggcaggagttgaggctggaacgtggagacctgcggaggcagacaccagaagacccgcgcacagacgcacgcagcccctggggcctcgtaaaccggattccaggcgcttttggcctggctaccgcaagtcctgctccccctgggccggcgcggggaagctatgctgaggaggatccgggcctggcccagggccctgcctcctcgggaaaacagcaccatattagcacttagcctgtgaggctggggtgggcgggcggcaggaagggcctcgggtgccagaggaatgagccccctttttgctggatcccagagggccatcaccctaaacctaggtgcctgtccaccactctgcgcatgtgtgccggctcctgccagggctagcagaccttacctgggatcttggaggtggcgggataaccagggaagacatgtcatggcagagtgggcctgagggggtgcacaggccagacccagcagcccagtctggcagccagggcttccgggccagctcaatgtctccccccgctgttcacatccgtcagtgccctgggtgggccccagagccgctcaaaccatgcctggcacttccatcctcagcatggctccgggaagaaggtgctttcatcccctgcactgtagcaacgaggactctgaagcacaggtcacctgccacccgggctcatgaggccaggtggagggtctggcactgccccaggttgctgggtgttgtggtccttgtcaccggtgcgaccagctaaggggacatcagccctcaggtgctccccatcggccacacacatcccgccccaacaccagccttctgagagtcctcaccacccttgaataaaggcccctttcatgtttccctcccgtgtccctcttccactcactacctccagaacggcctgtaagctgttccctcagcctggactctgggctcacaagaagtcagactgtaagctgtggagcctcgtttcctgggttcaaatcccccctgtgccactttctggctgtagggtcttgggccagtgacctccttcacctctagcctctgtttcctcatctttgaacttggggttagcttggcacctgccccacaaagtggctgtcaggacactggggcgacgcaggaaggccagaggtcagcgtctggctagaggtggccctacggtgtcactgtctcagcctgcccctcccagaagcctcctctgaccacctgttctgtctcacctcccccatttcctattgtgactgctgtaaacacctggccagatgtctgcctgctccaccaccctgaatgcttactgactgaataaaacgctgggtggtttgaagggctggtcacatgggccaccaggccacctcccgaacgtcagagcctcaggtcccctctccttcttctggtgaccaggcagacgcagaacccaagacatcacggacagcaagggatgtgcgctggctgctttatttaagggcttgtgattgacagctgtccccatcccagcccttgcttcctctacaaaagcaactgaacatgaaacgggcttcctggttaccatggggaggggggcggctccctgtcagggcccagcccagggacctggggaacggcggctttgaatccccggccacgggcactagaaggtggagaaggagagcgggaagtccagttgagatgggcacggtgctggtgaggaggctggagaggtcctgttccagcctctagtgggcttcccttgtccaggatgtcaggaaacagtcccccaattccgccggggggagccagagccccaaggctggggggccaggggctgcagggaacacagcaaaggctttcggagccaagtgagatcagttcaggcccctcaggcccaggaacccgacaccaccgcgtacctgtgagcacacactcacggccaccccagtgacacgtgcagccacacacacccacactcactcacacccacacccacacgcacacccactacacacacacacacacacacacacacacacacacacacacacacacacacggctgtgacagcccaggacccacaccctggacccctggaatgtctctggaccagaaccgaacagctggatccacagtacgcggggctgctcagggggcgggtcctctgtgtcgctactgattggccgcctcgcaggcgtctatccaatcactgtacacatccacgggttctgacagatctgggccacttaggtcaagggcgatcattggcattggaaccctgccctgcatcttctcaccccacagaaatcactaggtggcacctgttcctctggacggctttggccctgcaccagggcacacagtgggccagatgagcagggtccggactccagccccctccccaccctctggaaaaagcccaggtttccaaggatacacgttatgggcgtctggaattcctctaggcacacggtacaagagatgactccggtgttgcgggcacggtccctgaaacagaccaagagaagggactggtgagcaatgcgtcctgggcctgtgggtgatgacgccttcaccaagggaggcaaggggcaggatggagaacagcggggaagaggcagtggggaggctggatcccttgccctgttccccactcacattttcacatcacaggatttctcgtggttgcagaaggggcaggtgaactgggtctcgagggtgcctgtcatcttcttcttgggaggcggctttcgttttgactttctgcgccccatgtctgcaggtggatgagcctgtggggagtggcagatgtcagtggtttgaggaaaccacgcagcgccccagctcaatgctctagaaagcaggccggaaagagggtctgggacttgcaccgtggtcccggggcctctgcccttgagggacgaggccctcagtcctgatgcaggaggacaattccctgtcccactctggatggaaggggtgagacgaggctctaaccccatctctctcacttactgcgtgacctgggcaggttatttaagctctttgtgccacagtttcctcgtctataaaacagagacaaggccaggcatggtggctcacacctgtgatcccagccagcactttgggaagctaaggtgagaggattacttgatgccaggacctggataccagcctgggcaacatagtgaggcctcatctctaaaaaaaaaaaattaaaaattagccaggcatggtggtgcaggcctgtagtcccagctacttgggaggctgagatgggaggatcgcttgagcccaggagtttcaggtttcagtgatgatccagagttatgatccaggcactgcactccagcctaggcaacaggatgaaaccctgcataaaaaaaaaaaaagaaaaaaaaaaggccaggtgtggtggctcacacttgtaatcccaggactttgggaggctgaggcgggcggatcacgaggtcaggagttcgagaccagcctgaccaacacggtgaaaccccatctctactaaaaatacaaaaattagctggccatagtggcaggcacccgtaaccccagctactcaggaggctgaggcaggagactcacctgaacccaagaggcggagactgcagtgagccgagatcgcaccattgcactccagcctgggcaacagagcaagactccgtctcaaaaaaaaaaaaaaaaaaaaagtcgaaataaggttgctatctcagaggagacttgtggggctgacaccaggaatggtaagttaagtacttagcacagagctggcccatcatcgctggcgccaatacaaggaagccactgttcctggggagggtggcacaagagactccaagacaagccagctgttcagggccgggtggagcctaagagcctaggaactggtgattttattctggctgctcctcttggcaaaggacatgtaagtaccatccaggaggagtgacactcaggttatctgatggcctcgatccagatgacagactgcagggcagagaagtggggacaggcacttctgagtagaggaacactgtgtgaaggctcagggcagctgtccgtcccctggcaggtgagggagagaggagggacaggtgggagggttctgggtgtttggatggatcctgggagctacaaggagtgaaaggacaaagtcaccctgtgcttttgaggaactgcggtgtgagccataatctggatgaagacaaagtcacagccaggacagggctgttggggtagagatggcagagggtgagagagacagaggagacatggcggcagagtgagtgagtgtgacgagagaaggaaagtccaggatgactcccaaggttgtggcggggacatagtggctagagggacaaggtggcatcattctctgatgtctaacacataggaaggacagggttttggagaaaatgatggggttgggtggcagagggatatctaggaacagatgtccaggaggcaggtgggtggggaaacggcagcagttaccactgagcccaactcccctgcgaggcacggtgctcagggcactgtgtttgccatccctgagcctcctatggcgcctcctccaacacacacacacacgactgctggttctagcatcgttccactgtgacggggaggtcagcagcctgccagtgtcttccagaataaacagtggagtttcattcattatctgctgatcacttcctatgtaatacccccaactctttcttttttttttgagatggagtcttgctctgccgcccaggctggagtgcagtggcatgatctcgacccactgcaacctccacctcccggcttcaaatgattctcctgcctcagcctcccgagtagctgggagtacaggcatgcactaccacgcgtggctaattttttgtatttttagtagagatggggtttcaccgtgttagccaggatggtctcgatctcctgacctcgtgatccgcctgtctcggcctcccaaagtgctgggattacaggcgtgagccaccacgcccagccaacacccccaactcttaactgtgatgcttccagttcactgagtaaatagaagcaatccaaagacagctcctaggaccaactcattcagccattcacccaccctctttatttatctaagagatgaggtcttgctctgttgcccaggctggagtgcagtggcatgatcacagcttgctaaagcctcaatcctctggcctcagcctgctcagtagctgggacaacaggtgtgcaccaccatgcccagcttcggcatgcctcctttactatggaagtaagttcctgcaaaaacaatttgttcattctgccctggctcccatccccttttctttgagcaacatcaaattttccagctccactggatcactctcacacacttgttattacctctctcctcatttaaaaagggggaaaaaaaaactcttcatcctcttccagctatgatccttttctctgcaggctgttttagtgtacagccatctgcattcccacccatctctctgcaccccttgcctccaaacttaggttactggtggctccatactgcaaatcccaatggcagtcctcccattccagaggtccttcctcccctgagagcacatgtggctctcaggatgccatgtgctccctgtcctctgcctcactggtggctcctgctagtctcctatgctcctgcctctctgccaacttgctccaatgaagagagcacgtgagtttgggccaggcgctgtggctcacgtttataatcccagcactttgggaggccaaggtgggcagatcacttgaggttaggagttggagaccagcctggccaacatggtgaaaccccatttctactaaaaatacaaaaattagctgggcgtggtggcacatgcctgtaatcccagctaatagagaggctgaggcaggagaatcgcttgaacctgggagtcggaggtttcagtgagctgagattgtgccaccgcactccagcctgggcaacagagcaaaacttcatctaaaaaaaaaaaaaaaaaaggctgagtgcagtggttcacgcctgtaatcccagcactttgggaggccgaggtgggcagatcacgaggtcaggagttcgagaccagcctgaccaacatggtgaaaccccatctctactaaaaatacaaaaattagccaggcatggtggtgcacgcctgtaatcccagctactcgggaggctgaggcaggagaatcacttgaacctgggaggcggaggttgcagtgagccgaggcactccagcctgggcaacagagcaaaaagcccatgagtttaattgttggatcctctcctttctggctatactcaccacatgaagatttcacccagtcttagggcttcatgcctactctacactgaggccacctgcttctccagccttgagtctgaactgcagactctgatctatctgcctcagccacacctccacctgatgtctaacttccacctaagattaaacatatcatgtccaaaaccaagcccctgacattgcaacctgctcttccagtcttcctcatctcagctaacagcaattccatctttccggataatcaaatcagaaaccttggattcatcctcaatgtctttttccctcacacattccttatgcgatcctccccctgcccctctacctctgaaatataaattagccgcggcaccacgcccagctaatttttgtattttttgtagagacagggacccaccatgttgcccagcctggtctggaactcctgggctcaagagatactcccgcctcggcctcccaaagtgctggcgttacaagcatgagccaccgtgcccagcaataaccattactgaataaatcactcaatcagtttgcttgtaactctatcactttgggacgtcacgcccgtaatctcatcactttgggaggcccaggtgggaagatcgcttgaagccaggagttccagaccagcctgggaaacagagtgagacccttcatctctacaaaattacaaaaattagccttgagtctgtagtcccagctactcggcaagctgaagtgggaagcttgcgcccaggaggtcgaggctgcaatgagctatgatcgcgccactgcactccagcctcggcgacacagcaagactcactctcaaaaaaaaaaaaaaaagtccaaacaaaatctacggatgagccccagaagctcattttgcccagggactacagtctccccatcccatgaatggggtctggcttgcacaaggaatgcagaggcctcagcctgtcctgtgacaacgttaagtccaagagcgccaaaaggggatggcagaggagtcatcccccgaatctgctggtacccaagaggtggggggttggctgttcctccagactcactaaagcttcggcatcgcctcccgacggccgccgggaggagccaggcgtcccggtagtcgcgcttggaaggatggggtcggggggagtcagtctccccgaccggctttcccccaagctcgaggtcccaggagcctcctccaggaccccgtaaacgcacggagtagaggaacttccagtcctgcccacccccaacgcccactcgcacgagccgcaccagcactcaccttctccagctgcgaaagctccgttcacccgggagatagtgacttccgactcctgccggaagcggaaacccctctcctactttcaggtcccggccacccccatcccggacagcccagcaaataggccctgcctccttcgccgctcctctgagcgcacgcgtactcaaatagcagcgctccgacggagacgcagtgcgcctgcgcaagagccggtgcgtatttgcctgtacctacgcgcgatgccagtacttctggtcagtttccaggagcggcaagtgaggaatatgaaataaccttatggctgaatcagggtgaaggggaagcttgtaagcatggaagacgctctactcaaactaaaaagttcaagttctgatccagcagatgaagagggaggcctgagaggctgctgttctaactcgctcccaggtgacttccatgctgctgatccgcagaccacattttgagtgcccagattgtagtagatgaggttgagtggacaggctggggccagattccatggagcctcgtgggccgtgttaaggatttttattttttatttttgttttattttattttatttttttgagacggagtctcactttgtcgcccaggctggagtgcagtggctcgatttcggcccactgcaacctccgcctcccaggttcaagtgattctcctacctcagcctcccgagtagctgggattacaggcgccggtcaccgcgcccggctaatttttgtagttttttttttttttttttttttgagtagggatggggtctcaccatcttggccaggctggtcttgaactcctgacctcgtgatccacccgcctcggcctcccaaagtgctgggattacaggcgcgatccacccgcctcggtctcccaaagtgctgggattacaggcgtgagccaccgcgcccggccaaggacttttattggtttttatttttggttttgtttttttctgagacagggtttcgctccgtcgcccaggctggagtgcagtgacgccatatgggctcactgcaaccttagcctcccgggttcaagcgatcctcctgcctcagcctcttaagtagctgtgattacaggtgcgcactaccatgcctggctaatttttgtatttttagtagagatggggtttcaccatgttggtcaggctggtctcgaactcctgacctcaagtgatccatccacctcggcctctcaaattgttgggattacaggcatgagccaccacacctggcctgaaaaagatatttcaagatggagagagagaggggttagctgtgtcacgtgtccctgagttgaagaagatgaggaaagagaattgacagttgagtttggcaagggtctggtccctgcggaccttgataagagctgttgcattagagtgttcaggaagataatttgtaatgaaatgtatttcgaatacagatgctctttgatttacgatggggttacatcccgataaacctatcataatcaagtcaggggctgtctgtagagggatctctaggatatcccctagggggcagtgttaccctggtaaccgtcaagtgtaaccagtagaactgccctcttgtgagaccctttttcagtgctggagcaaactagaatacacacaggatggaatcatactatacagttaccgtgcaacttgctatttccacttaaccatctatacacgtatacctaacttttgtttttagtagctacatgattcatagtgcaactctgccatagtataatcaacggttatcctactgatggacaattcctggactttcctgagttttgccactgtgatgatgcagtaaatgtccctgaatcagtatccttaagactggatctttagtgaagcatagttttcaaaaaatgacatttgtgagtacagtgtctcaccccagtaaccccagcactttgggaggccgaggtgggaggactgcttgagcccaggagtttgaggctagcatgggcaacatagtgaaatcctgtctctaaaaataaaataaaataaaataaaaaacaataaatgatggccgggtatggtggctcacacctgtaatcccagcacttttttgtttttgcttttttttttttttttttgagacagagtcttgctctgtggcccaggctggagtgcagtggcgtgatctcggctcactataacctccacctcctggattcaagcaattctcctgcctcagcctcctgagtacctaggattacaggtgtgcgccaacatgcctggctaatttttgtatttttagtaaagatggggtttcaccatgttggccaggctggtcttgaactcctgacctcgtgatctgcctgccttggcctcccaaagtgctgggattacaggcgtgagccacggcgcctggcccatcccagcactttgggaggccaagacgggtggataacctgaggtcaggagttcaagactagcctgaccaacatggtaaaaccttgtctctactaaaaatacaaaaattagctgggcatggtggcaggcacctgtaatcccagctactcaggaggctgaggcaggagaatcacttgaaccccgggaggcagaggttgcagtgagccgagatcgcgccactgcactccagcctgggcaacaagagtgaaactccatctcaaaaaaaaaaaaaaaacaaagacattgagtcacaggatgtatatatctttcattttgttcatgattgccacattagttttctctttttctctcctttcatcccttccctctcttacttccctccttcccagctttgttggatgtaattgactgaacatgaactgctcatatttaaaccatgcctggccgaaattgcatgttttgacatacaggtatatcattaaaacatgaccataatcaagacaattatttccatcaccctaagaaatttcctcttaccagtagccgagtgtgatggctcatgcctgtaatcctagcaccttgggaggccgaggtgtgcgaatcacgtgaagacaggagtttgagaccagcctgggcaacacggtgagaccccttgtagtctccactacaaatacaaaaattagccagacatagtggcacacgcctgaagtcccagctactagcgaggctgaggctggagaatcacttgaacccgggaggcggaggctgcagtgagccaagattgtgccactgcactccagcctgggtgacagatcaagactcagtcttaaaaaaaaaaaaataagaaaaaaaagaaatttttctcttgcccttttgtgctctgtcccctactccagcccctggccctaactgatttgtttttggttcctgtaactttgtctttttcagaaagtcatataagctgaatcatacaacgtgtagccttttgagctgggcttctttccccagcataagatgtttgaaactcactcatgttcccagcattttgggaggccaaggcgggtggattgcttgaggtcagaagttcaagaccagcctggccaacatggtgaaaccccatttctactaaaaatacaaaaattagctggatgtgttggtgtgcgcctgtaatcccagctacttgggaggccaagccaggagaatcacttgaaaccaggaggcggaggttgcagtgagccgagatcacgctattgcactccagcctgggcaacagagccagactctgtctcaaaaaaaaaaaaaaagaaaaaaaggaactcactcgtgttgttggatatgtcagcagtttgtttcttttttgttttcttttgagatggggtctcactctgtcacccagactggagtgcagtggcaccatcatggttcactgtagcctcaacttcccaggctccagcagtcctcccacctcagcttcccgagtagcggggattacacctgtgcaccaccacgcccagttaatttttgtgttttttgtaaagacaaggttttgccatgttgcccaggctggtctcgaactcctggactcaagcaatccacctgccttggcctttcaaagtgcttggattataggcatgattattattcagttgtattctgttatatgaatgtcccacactttgtttatcttttcacctgttagtgacctgttttttgcattgttgccggttgttgaacaattattagagctgttatgaaccatttctttcattttgagggtggcagatgacaccactccaaaatatgccactttggcatatggattgtttcagctaagtgcacttgaaaaacagtaggtgcaggaaaagcactctgacctccctcttttctctggaaaacgagataaacccccatatggaagatgccctccccatcccaggaagaaagtaaaattctttttagacagggtctcatcctgttgcccaggctggagcgaagtggtgtgatatccacttcctgcaacctcactgcaacctccacctcctagtcttaagcgatcctctcgccttgtccccaaaatagctgggatcacaggcgcccaccaccatgcccagctaatttttttgtatttttggtagacacagggtttcactaagttgcctaggctggtgtccagctcctgagctcaagtgatccacccgcttctgcctcccaaagtgctgggattacaggcctgagccaccgcgcccagccctagagcgtacaattcttatcaccagaagacagggagtcaaagctgaggaaaaaatgtacaaacaaaccttgttaaatgaacccttatttttctagttatttttccaccattaactgctctagcccaaacccctttgtcttgtcacattttcataatttactacccttttaaaactttatttataatatttatttataattttaaaatttatttatatatttatttagagacggggccttactctgctgcctaggctggagtacagtggcacaatcatagctgattgcagcctcaaactcctgggctcaagcgaaactcccacgtcagcctcctgagtacctgggactacaggtgcgtgccacccagctaattttattttctgttgttttagagatggggtctccctgtgttgtccaggctgttcttgaactcctgggtccaagcaatcctcccaccttggcctcccaaagtgttgggattactagtatgagccaccacgcccatctataatttactactttttttttttttttttttgagaagtctggctctgttgcccaggctagagtccagtggtgcgacctcagctcactgcaacctttgcctcctaggttcaagtgattcttctgcctcagcctcccaagtagctggaattacaggtatgtgccaccatgcctggctaatttttgtatttttagtagaggtggggtttctccatgttgattaggctggtctcaaactcccaacctcaggtgatccgcccaccttggcctcccaaaagtgttgggattacaggcatgagccaccatgtccatccataattttctactgtttgtctaatacagtaaataagtgtttgactgtaactgcttctttgggtcttccttttcagggctcccatgtcccatagaacttatgttaaatatatttctatgcttttctcctattaattgatcaaatgtcagtttaagtcttaggccccgccagagatctaagagggtagaggagaaatcttgccttccctccacaggtctttgtgtggatgttcatttgcatctttccctgtgattgcttgcttgcttgcttgcttgattgattttgagacagggtctcactctgtggcccaggcggaagtacagtggcatgatcatgactcactgcaggcttgacctcccaggctcaagtgatcctcccaccttagcccctgccccaccctctccaccccaccctctcaaccccctgagtatctggaactacagataagcacctccatgcctgtttacttttttatttttattttttatttttggtagagatgggattcactatgtttctcaggctggtcttgaacccctaggctcaagcaatccacccaccatggcctcccaaagtgctgggattacaggcatgagccaccacatcctgcctccctgaaatatttgattccttcggaatttatttttgtatgtggtctaaggtagggttcaggttttgtctcattctagtgcaaactgacaaggcaaataacacctccttttccatgaagttgcaatgcgaccttgaacctatattatgttcttaaataaatcttcctgaatttgttcttggattccctcagtattttcctgagtcaatgctatattgtttttgtatttgtttctactttctctcttgatattttcccgagccaatgttttgttttggtttttttttatttttttttattttagagataggatctcactccatcatccaggctcaggctggaatgccgtggtgtgatcattgctcactgtagcctccagcacctgggctcgagggatcttcccacctcagcctcctaaatagctggaactacaggcgtacacctccatgcctggttaatttatgtattttttttttaagttggggccttgctatgttgcccaggctggtcttgaattcctggccttaagtgatcctcacatcttagccttccaaagtgctgggattgcaagtatgagccaccacaccttaccctgagtcaatgtcaatgtccttttttttttttttttgagacggtgtcttgctctgtcacccaagctggagtgcagtggcgcaatctcggctcactacaacctctgcctccagggttcaagtgattctcttgcctcagcagcctcccgagtagctgggattacaggtgcccaccatcacacctggctaatttttgtatttttagtagagacagggtttcgctatgttggccaggctggtcttgaactcctgacctcaggtgatccacctgcctcagcctcccaaagtgctgggattacaggtgtgagccaccacacctgaccctgagccagtgtgttactattttgatgactgtatgttttgctattggtaaggcaggtatctcaccttcttattcatgattcttggcctgggatgctgtttaggaagtggacatggcctgagtgtcaagtgacagacagcctactggctgcatgagaatgccagtccctttttcagcctctagtttgacaagcagagtggcaagatgatagtgtctgtgacagctgaaatcaggagtggttggttgctcaggaggatcgagaagagatgaaaccctgccacttgcctgagggactctgctgtctcgtttcttgcaggttaaaaggcatctttccaaaaatggctgaacctggtgtggtggctatgcctgtaatcccagcattttgggaggccaaagtgagaggatcacttgaggacaggagttcaagaccagtttgggcaacctagggagactccatctctctttttttttttttttttttgagatggagtcttgctctgtcgcccaggctggagtgccgtggcgcgatcttggctcactgcgagctccacctcccaggttcacaccattctcctgcctctcagcctcccgagtagctgggaccacaggcgcccgccaccacgcccggctaatttttttgtgcgtgtgtttttagtagagatggtttcaccgtgttagccaggatggtctcgatctcctgacctcgtgatctgccctcctcggcctcccaaaccgctgggattacaggcatgagccaccgcgcccggcatttttttttttttttttggagacagagtctcagtccattgcccaggctggagtgcagtggtgtgatctcgactcactgcaacctccacctcccgggttcaagcagttctcccaccttagcctcccaagtatctagggttataggtgcacaccaccgtgtctggctaatttttgtattttttggtagaggagggatttcaccatgttgaccaggctagtctcaaactcctgacttcaggtgatctgcccgccttggcctcccaaagtgctgggattacaggcgtgatgtaccatgcccgaacaccatttcttaaaataaataaattaggccgggtgcggtggttcatggctataatcccagcacttcaggaagccgagatggacagattgcttgagcccaggagttcaagaccagcctggacaaagtggtgaaaccccctctctacaaaaaatacaaaaattggctgggtgcagtggctcacgcctgtaaccccagcactttgagaggccgaggtgggtggatcacgaggtcaggagatcgagaccatcctggtcaacatggtgaaaccccgtctctactaaaaatacaaaattagctgggcatggtggcgcacttacctgtagtcccagctactcgggaggctgaggcaggagaatcaattgaacctgggaggtggaggttgcagtgagccaagatcaggccactacactccagcctggcgacagagcaagactctgtctcacggtgaaaccccgtctctactaaaaaaaaaaaaaaaaaaaaaattagccgggcgtggtggcgggcgcctgtagtcccagctactcggagaggctgaggcaggagaatggcgtgaacccgggaggcggagcttgcagtgagccgaggctgcgccactgtactccagcctgggtgacagagcgagactccgtctcaaaaaaaaaaaaaaaaaaaaaaaaaaaaaaaattagccaggtgtggtggtgtgtgcttgtagtcccagctgttcaggaggcttaggtgggagggaggattgcttgagccccggagacggaagttgcagtgagctgtgatcacactactgtactccagcctgacagcctgggcaacagagtgagaccctgtctaaaaaacagaaaagtaaagaaaaaaataaaataattaattaagatggctgagtgctggctggtgttgtctcctcagcaagacagaagctccctgagggccagcgcccaccctgatttattcctcctagtgtccttgggtccccagctgcctggcacagagctttggtccttggtgctcggtagaagtgtctggctgatgtagaggagggagcctgagttacaatcccccctcccctgccactcagtcttcgtgtgacattggatgtgtcacttcttctttctgtgctctgggccatgagaacggggtccttgggctatgatggtgacctctgattcagactcctgcctgtctggtgcctctgagtcagtgagaagagcgcggctgtgacctccctagactgttgtggttaagattgagggactgccacttcctagaaattaccttggtcacagtggttaagccgtccaatctaagataaatattgtaccaaaaaaaattaaaaaataaaaacccacaaaaacacgtctgagcttctgtaatagcctctgagaagcaaggatgattctggcccctgcctcatgggccaggatcagaagtgacggtaaatggcagctggaacaaactcaggattacattttggggatttgtttgtttgcttgagacagagtcttgctctgttgcccaggctggagtgcagtggtacgacctcggcccactgcaacctccacctcctgggttcaagtgattctcctgtctcagcctcctgagtagctggaattacaggcgcccgccacaatgccagctaatttttgtatttttaatggagacagcgttttgccatgttgatcaggctggtctcgaactcctgatctcaagtgatctgcccgcctcagcctcccaaagtgttgggattacaggtgtgagccaccacccctggccaggattgcattttggaaagatcactgcttaattataacagttggccagacatgatggctcacacctgtaatcctgcattttgggaggctaaggaggaagaatcacttgaggtcaggagtttgagaccagcctaggcaacatagcaagaccccatctctacaaaacacacacacacaaaattaaccaagagtggtggggtgaagctgtggtcccagccactcaggaggcagaggcaggaggatcccttgagctcaggaggtggaaactgcagtgagctatgattacaccattgcactccagcctgggcaacagagtgagacactgtttcaaaaaaaaccaaaaaattgtaacagtaacacatacaccttgtaacaaattcaacagtattgacatctataaagtagcaaattataccaagatacacacacacacacacacacacacacacacacacacgcgcgcgcgcaaagtaacaaataagccggagcagtagctcatgcctgtaatctcagcactttgggaggcctaggcgggtggatcacctgaggtcgggaattcaagatcagcctgaccaacatggagaaaccctgtctctactaaaaaatacaaaattaaccaggcgtggtggcgcatgcctgtaatcccagctactcaggaggctgaggcaggagaatcgcttgaatctgggaggcagaggttgctgtgagctgagatcacgtcactgcactccagcctggacagcaagagggaaacttcttctcaaaaaaaaaaaaataagtaaaataacaaatgaaaggtgacaatttcaccaagtgcctctccccagaagtaacctcagttacttttttttttttttgagatagtctcccaaactggagtgcagtggcgtgatcacagctcactgcagcctccacttcccagacaagaacgattctcatgcctcagcctcccaaatagctgggattataggcatgcatcaccaggcctgactcattcttttgtattttttagtagaggtgggtttttgccatattggccaggctggtcttgaactcctgtcctcaagtgatctgcctgcccctacctaccaaagtgctgggattacaggcatgagccactgcactcagccctgtttacattttgtccagattcatttcactccgctaggcaggcagctggagccaaacaactgggtccctgccgtgtagcagttgcaagtggcggttgagggtgggccaaaggaggggttcctgtgccttgcctagcgctaatggcctgggttgcctgggggtgggtgttacttaactctccctcagaggggaactgggctcccctgcaactgtcacatcaggtctagcactctgctttcagtataagaaaaacaggccctgagatttttttttttttttttttcccctgaaacggagtctcattctgtttcccaggctggattgcagtggtgtgatctcggctcactgcaacctctgcctcctgggttcaagcgattctcctgcatcagcctcagtagctgggattacaggcacgtgccaccatacccagctaattttttgtatttttagtagggatggggtttcaccatgttggccaggctggtctccaactcctgacctcaagtgatctgcctgcctcagcctctcaaagtgctgggattacaggtgtgagccactgtgcccagccctgagataattctccttctagaagttttcttacacattactttcacagcattggtccagggaccaccactgcagccttgttggtaagagggaaacaattatttatttatttatgtattttgagaaagagtctcgctctgttgctcagtctggagtgcagtggcgtcatatcggctcactgcaacctccgcctcccgggttcaagcaattctctgcctcagcctcccaagtagctgggactacaagcacacgccaccatgcccagctaatttttgtatttttagtagagacggggtttcactatattggtcaggctggtctcaaactcctgacctcaggtgatccacctgcctcggcctctgaaagtgttgggattacaggtgtgagccaccatgcctggcctagaaggaaagatttaaaaagaccacggctgggtgcggtggctcacgcctgtaatcccagcactttgagaggccgaggtgggtggatcatgaggtcaggagttcaagaccagcttggcaaagatggcgaaaccccatctctactagaaatacaaaaattagctgggcatggtggcgtgtgcttgtagtcccagctacttgggaggctgaggcagagaattgcttgaacccgggaggcggaggttgcagtgagccaagatcgtgccactgcactccagcctggctgatggagtgagactccatctcaaaaaaaaaacctcaatgaggctgagcactttggcactttggctcacgcctgcaatcccagcactttgggaggttgaggcaggaggatcacctgaccctgtgaatttgaggctgcagtgagctatgatcctgccattgcactctagtctgagtgacagagcaagattctgtctctcaaaacaacccccaaaaccaataaaatcctgcaaggggcactagcaaggagccagtgacataaggcagaagcttcgtggctgtcaaaaagaagtgcgatctttttccttgttcctgggaatcctgcaaacatgtctgccccataggtaatgcgtagacaaggtcatttgttatgacattgaggattgcaaaattgttcgaagtgttacaggaaaggggtctcgatccagaccccaagagagcattcttggatcttatgcaagaaacaattcaggactgggcacagtggctcatgcctgtaatcccagcactttgggaggccaaggcaggtgaatcacctgaggtcaggagttcaagaccagcctgaccaacatggtgaaatgccgtctctactaaaaatacaaaattagccaggcatggtggtgggggcctgtaatcccagctacctgggaggctgaggcaggagaattgcttaatcggttgaacccaggagatggaggttgcagtgagccaacattacacccatgtactccagcctgggtgacagagtgagactccatctcaaaaaagaaaaaaaaaaaagtggagtgcagtaacgggaatgtgtgcagaactatgtgtatattgtgttgcttttggtgtaaaaaatgggaatgtgtttgcagtggcatgcccctgtaatctcatctactcgggaggctgagatggatcacttgagcccaggagctcaagaccagcctgggcaacatagcaaaactctgtctctgaaaaacagtctggaagcaatagctcatgcctgtaatcccaacactttcggaggctgaggcaggaggattgcttgagcccaggagtacaagaccggtttgggcaacagaacaagactcccatctctacaaaaaaaaaaaatctaaaaattagttaggagtggtggtgcgtgcctgtagtcctagctacttgagaggctagggtgggaggatttcttgagcccaggagtttgaggctgcagggagctatgattgcaccactgcactccagcctggacaatatagcaagacccctctccctaaagaaataataggccgggcacggcggctcacgcctgtaatcccaacactttgggaggctgaggcgggcaggtcatgaggtcaggagattgggaccatcctggccaacatggtgaaaccccatctctactaaaaatacaaaaattgccaggcgcggtggctcactcctgtaatcccagcactttgggaggctgaggcaggcggatcacgaggtcaggagattgagaccatcctggctaacacgatgaaaccccatctctatttaaaaatacaaaaaacgagccgggtgtggtggcagacgcctgtaatcccagctacttgggaggctgaggcaggagaatggtgtgaacccgggaggcagagcttgcagtgagccgagatcacgccgctgcactccagcctgggcgacagagcaagactccatctcaaaaaaaaaaaaaaaaaaaaaaaaaattagctgggcgtggtggcgcgtgcctataatcccagctactcaggaggctgagccaggagaattgcttgaatctgggagttggaggtttcagcgagccgagctcacgccactgcactccagcctggtgacagagtgagactccatctcaaaaaaaaaaaaaaagaaaaaaaaaagaaaataataaagggaatgttttgattatggaggcatagactatatagagaaagaaaatgattaatattagttgcccctggggtggaggaagacttgctttatgttgtacccttctttctgcttggattttattgaattaattttttttttgagacagagtcttgctctatcacccaggctggagtgcagtggcacaatctcagctcactgcaatctccgccctcacctctccaccccctttacccgcaaaccccctaggctcaagtgattctctcgcctcagcctcccaagtagctgggattacagtcatgtgtcaccacgcctagataagttttgtatttttagtagagatggggtttcaccatgatggccaggctggtcttgaacttctgacctcaagtgatccgaccacctaggccttgcaaagtgctggcattacaggtgtgagccatcgtgcctggcctattttatttacttattttttttgagacagattcttgctctgtcacccaggctggagtacagtggcacaatctcagctcattgcaacctccgcctcctgggttcaagcaattctcctgcctcagcctcctgagtagctaggaccataggctcctgccaccacaactggccaatttttttttttcaggcagagtttaactcttgttgcccaggctggagtgcagtggcgcaatcttgactcactgcagcctccacctcccagatgcaagtgattctcctgcctcagactcccaagtagctgggattacaggcactcgccagcaagcctgactaactttttgtatttttagtggacatggggtttcactatgctggccaggctgatcttgaactcctgacctcaaataatccacccgctttggcctcccaaagtgctgggattacagatgtgaaccactgagcctggcctctgcttggattttattttttttttattttttatttttttgagatggagtctcgctctttcacccaggcaggagtgcagtggcgctatcttggctcactgcaagctccgcctcctgggttcacactattctcctgcctcagcctcccaagtagctgggactacaggcacccgccgccacgcctggctaatttttttgtagttttagtagagacggggtttcaccatgttagtcaggatggtctcgatctcctgacctcgtgatccgcccacctcggcctcccaaagtgctgggattacaggtgtgagccaccgtgcctggccgggttttataatcacatccatggataaggcaacttggtcatggatggggtaagagatggaggcaaggaacagcagctcaggggagcccagccactctaaccaggagaacataacacaccagtggcactggttcagccttggcaactattcttttattgaacatcagtaacagaaagatgcttgatttaggaggaagctttccctccctccctcccccattgcaccccggaactcagcaaaggtgagccagccacagagcataacactgtggctgggacacatgtccatgtgtgtttcacatacgtgggcatctgtgccacaagggtcatgtggcaccacagttcatcagctgtgtttccccttcctgccctgctgcagcgccacaggttggaggaaaagcctgcctgtgagcagggtcccggcagggcccacccacccaacagtggagatcgggcctcagagctgggcagtcatgggagttcagggcctggctcgcctcggcagcctggtcttaaagagggacttgcccgaggcctcgatgtaagtgacagtcatctctttggagctgatctccacataggcaaagccacccagtgagtcttcagtcccatagtggaagcgcagatagccgttggggaccttgcgctggtgccgctttgaggggtccatgaaattcccagccccactcagcacgtagcccacgccattctcatcttgcaggtactgaggatggaggacaaggggtcagtggagacccagctttgagcagagccctgcctaaggtccagggctcgatctggccctaaccacagagtcaccttgaggtatgtaacccctcctggcttcaatttcctgacttttaggagtgtattaatcctatttcataggtagagcacttagtaagaaattggtggccaggtgtggtggctcatgcctgtaatcccagcactttgggaggctgagggggtggattgcttgagcccaggaatttgagaccagcctgggcaacatagtgagaccttgcctctacaaaaaaaatgcgcaagggccaggtgcagtggctcatgcctataatcccagcactttgggaggccgaggcgggcagatcacttgaggtcagaagttcgagatcagcctggccaacatggtgaaaccccgtctctactaaaatataaaaattagcaaggtttggtggcccatgcttgtaatcccagctacttgggaggctgagacaggagaattgcttgaacccaggaggcggaggttgcagtgagttgagatcgtgccactgcactccctctcaaaaaaaaaaaaaaaagcaaaaattagctgcatgtggtggcccatgcctgtagtgtcagctactctggaggctgaagtgggaggttcacctgagcccgggagattgaagctgcagtaagccccgattgcaccactgcactccagcctgggtgaaaaacaatgaaaccttgtctccaaaaaaaaaaaaaaaaaagagcttaaaaaagaaagaaagaaagaaattggcaattcgaagatattattctggctttggagtgttttcctggttagacagcaagatttgagggacagtctagacattctgaaggccacaggagaccctcaaacagcaggaggaccccagccatgtggacatcagctgggatggggacccccctcacccagctcccaccccacccacagggccctcacctgcagattgtgatcgtggccgcacaggtaggcagtgaccccgtatgtggccagcagtggccgtagctgcttgaccaggcagtgggtaggcccgtgctcggctatggaccacacggggtagtggccagccaccagcacgtagtcctccctggccgccgccagctgtttcttgagccaggacagctgtgtgcgggccagcttcacgtctcggggcctctcaggctgctggctgaggaagtcatctgagttgccacatagtgtcactgtgtccagcataaaaatggccacagacacattggtctgtgggatcttgaagtgcaggcggtagaaagggctggggaagttcctgtggaggggatagaggtcgtgggtgcacatcttgggcgcagaagtcccagggtcagctcaagccacagggcccctgtgtccctgctatgtgaggatctcggaaggcagggctgagggtggctcaccagcgcttggagatcttagagtatgcaatctgggcagagacattgccaaggtggtcatggtttccggctagcacgtaccagggcactttgcgaagggagcggtcagagaatacgtcctcaaaggtctcctgtagcaaacagatagggcaggcctcttccctggggtcagtggctatgccgatcctcccaccaagtcaggataagggagacactgaatgctcccggcgcccaaaggtgccccatcaccttccctctgccctcaccaaaggaaggtcactaggtaaggcggcttctccccactgcccgcccccacctcctgccccactctgttgggcacagacctggaacctcttgtcattgatgtcttgcacaccagtgaagtaaaaattgtcccctagagacaggatgaagtctgcacccaggatctgcacagtccgagcgatctccttggcattggccatttcccgggccgtgtggaatggggcattggggacccctccccagtcacccacggctacaaagcgcagggcaggggtggcaccatcagccagggagggtagcaacaaggcttgcaggatgagcagcgccgtccacatgtccatctgggagaagagagacaagcataggtggcccgggctgtgacaagggcagggaggccttgagacccccgcctgccctgagatagagggagactgcttgctgcaggctgcccctgcgggaaccccttggtgccctaattctcaggacacacaagctgcacaaggctgcacaagctggcttagggaaggggggcgcggtctgtgagagggcgagctgtaccaagatggccctgcaggcccatttcaccctccttccacctagcctgcccagcactcacccagggggagacacaggccagtcaccggaggctctgagaggctggtgggctctagagtagaactgccggtccctgagcctttattccctgaggaggaagtggatcattagtgaggatgatgcagtttctccgagggctgtcccgggagccctccccttgggtcatgtgagccctggacttccctggagcaggacacgggattggggtgggggtgggaggatctgggcacacgtgtgcagcagcctcggcccacacagcctccgggtggacctgcaggggcctgtttgtgctgtaggcttgacacgtccaggtatctctgtgtgtctgtgtatctcagtgtgagtgtgtgtgtgtgtgcacacttgagaggctgtggctgtgattacccaagacacatctcctgcaccttctttctctgagtaagggcttacctgtgtgtgtctgggtgtgtcttgcttcctgcgtgcagctgagcatgcctacctgggcctcggctctgtacctgatggtgttgctgcagacatgtatgctgagcctgcgaggcctgtgtggcttgtctgcgatgcacgcctgtgttctcacgtggcactgggtgggaatccctatggatggagttttgtgtgtgtccatgtgtgtgtgcctgggttgcatctctaggatgggttgcgtgtctggtgtgggagctgtgtttgacaacatctgggtgggggactccgcgtgtgtccccgtcctccccctgccctctctccatcccacacataaacaccaacgggcttcccttttccaggaagtcctgcccacaccctcccctccccccagactcccattcctgcaggaggaaccaggcaggaggcagctagctggtgatagcgcgcgtgaccacagacctctgaccctcatagtctcagcagctgtctgcaggccctccacgggaccgcagcctgggagggcaggaggccctgcacctgcggccggtctgacctgctcctcacctccctgcctgcctcctccgtgctgggcgccgccgcgacacgtcccgcggacattcaggagtcccttcagtccctgcgagcgcggacccgggagagagctctcattcaacgctgaggccactggctcacagatctccccgggtcaccctgcgaagtgcttggtcccccccattcccagccctgcagcagcaacaaacgggaaggaagtgggtgacgaggacaggcagagacccctcccacggggccgcccgcatctcacctgccgtcgcggggcgggcgttgcggccggtgcccagctgcagatccgcaggcgatcgcactcctggcggccccagctttaagcaggcagcggccgatccgccctgctcgagggctcagggctgacccaggtgagccccggcggggagggcgggcgcctcggcctccccgccccggaaccctgcaccgcccagagccgccacgcctcccggctgtaggctccgcatctgtaaaatgggccgatgaaccccaagggtcggctcagacccacggactgcagctgcagctgggctagaaggggtggccaggggagccgatttcatccttttccttcctccacgccaaccaggagcctccatctgcctgggaccctttgggggcacccatgggcccacagccgcagaaccacagcactgggtggggtttcagccctggggccaagctcttgtgaggtctgtcatcatcttctcctgttgttttgtttttttgtttgtttgtttgtttggtttttttttttttgagacagagtctcgctctttcacccaggccggactgcagtggcgcgatctcggctcactgcaagctctgcctcccgggttctcgccattctcctgcctcagcacccccgagtagctgggactacgggcgccgccaccgcgcccggctaattttttgtattttttagtagagacggggtttcaccgtgttagccaggatggtttcgatctcctgacctcgtgatccacccaccttggccttccaaagtgctgggattacaggcgtgagccaccgcgcccggcctgtttttgttttttttttttttgagacagttttattctggttgcccaggctggagtgcagtggcgcaatcttggctcacgcaacctccgcctcccgggtacaagcgattctcctgcctcagcctccctagtagctgtgattacaggcacgcaccaccacgcccggctaattttgtatttttagtagagacggggtttctccatgttggccaggctggtctccaatgcccgatctcaggtgatctgcccacctcagcctcccaaagttctgcgattacaggcgtgagtcaccatgcctggccagtctcctgtttttttaaaaacttattatttagccggtgtggtgtctcacacctgtaatcctggcactttgggaggccgaggtgagcggatcacttgaggtcaggtgttccagaccagcctgggcaacatggcaaaaccttgtctctactaaaaagacaaaaattagctggaggtgctctcttgaacccaggaggcagaggttgcagtgaactgagatcatgccactgcactccaacccaggaggaggaggttgcactgagccaatatcatgccactacattccagcctgggcgacagagcaagactctgtcccccccaaaaaaaaaacagaaaaaaaaaaaaagaaagaaatctgaagcaattatgaccaaatgttaacatctgtttcttcacgtggtgggtacaggcgtgttttggaagcttctatgcttcctgtattttgagatcacacaaaattatgtttattatcttattgtgctacatgatctttgtagaaaagttggtaaattctggaatgcacgaagaaaaagattataatagccagtaatacccctgcccagagagacagtatccattaatttttctctgcctatgtttgtcttcggaaaaatgggatactattggcactattttataactttttaatttgtattaacactttctatattttttaaattgaaaaagctggccaagcatggtggctcaggcctgtaaacccagccaatgtgggaggatcgcttgagcccgggagttcaggaacagcctgggcatcgtggcgagaccacattgctacaaaaaaaaaaaaaaaaaaaaaaaaaattagccaggcatggtggtgcacacctgtggttccatctactcaggaagctgaggtggaggatcgcttgagcctgggagtttgaggctgcaataagctacgaatgcaccactgaccttcagcctgggcaacacagctagactcttgtctcagagagagagagagagagagagagagagcacaatgaaaaaaataaacctgatcttgcacagagcatgtaataaaacctgtgcgttcttggctatctctctctggtctcctccagggtgctgaataagctcttctctctccattcacccaggagaactctcttctgctgattttctgtggagctagatcaggctgtgactcagaatctccctccacctccaccctttcctattttcccaacaccagtgtcaatctcagatgtcaacaaccccacgagtgagttcctcctgttgccaatacatccaggtcctgttctccgctgctgtctctacccaatcccttcccttccttcctcctgccaatcctgctttccctgtttcttgctcctctgacctcctccgcattgcttgactgtctcagatacactctggcctcagggtcttggcactttctgttctccctgcctggaagggtcttccttagtcagatactgaggtcacccattgtgttcaagttcctttaatttatctgaaatgagtctgggcgtggtggctcacgcctgtaatcccagcactttgggaagccaagccgggtggatcacttgaggccaggagttcgagaccagcctggccaacatggtgaaaccccatctctactaaaaatacagaaattagctgggcgtggtggcacaaacctgtggtcccagctactcaggaggtcgaggcaggagaattgcttgaacctgggaggcggaggttgcagtgagccaagatcgtgccactgtactctagcctgggtgacagagtgagactctgtctcaaaaaaaaaaaaaaaaaaagaaaaagataatttatctgaaattatctgaaatgcaccaccctgcccccatcattgactctcctgttgctgtagttttctctgcagcacttaccagtgcttgagaaaaccacccactcatttatcttgctttcagtttctcttgctttcagtctgtcttcagttaatgaaagctttttttttctttcttttttctttttctaaaacagagtcacccaggctggagaccagtgatgcgatcacggctcactgcagactcgaccttctgggctcaggggatcctcccacaccccttggcctcctggggattgagactacaggcacacaccaccacacccagctaatttttgtattttttgtagagagagggatttgtcaccttgtccaggctgctcttgaactcctgagttcaagcaatcctcccaactcagcccctcaaagtgctgggattacaggtgtgaaccactgcccctggcctgtttatttaaaaaattaacattcattctcagtttattggctaagtttagaagtagtatcagaatgtttaagagaacttactgttctccttttatttgtatgtttgcattgtagatttttaataactgataaggacttctcaaggtgtttgcttggtggagacatttaaaaagattaaagaataggccaggtgcagtggctcatgcctgtaatcccagcactttgggaggccgaggcgggtggatcaagaggtcaggagatcgagaccatcctggctaacatggtgaaaccccatctctactataaatacaaaaaattacctgggtgtggtggcacgtgcctgtagtcccagctactcaggaggctgaggcaggagaatcgcttgaacccgggaggcagaggttgcagtgagctgagatcgcaccattgcactctagcctgggtggtagagcaagactctgtctcaaaaaataataataataaattaaaagattaaagaataagctggcacagtggctcacacctgtcatcccaacactttttgtagagacctcatctcttaaaaataaaattagctgggcgtggttgtgtgcacctgtagcccagctactcaggaggctgaggtgggagcattgctcaggaggtcgaggctgcagtgagccatgattgcaccactgcactccagtctgggtgacagagctgatacactgtctctaaaaaataataataattgaccgggcgcagtggctcacgcctgtaatcccatcactttgggaggccgaggcgggcggatcacgaggtcaggagatcgagagcaacatggctaacacggtgaaaccccgtctctactaaaaatacaaaaaaattagctgggcgtggtggtgggcgcctgtagtcccagctactcgggaggctgaggcaggagaatggcatgaacctgggaggtggagcttgcagtgagccaagatcgcgccactgcactccatccggcttgggtgacagagcgagactccatctcaaaaaaaaaattaataataataattattattatagtagtaaaagagtatagaataaaatgcatcacacttataaaatgtaaaatgttaatttcaatccactaaacttataaacggacccaaatatgcatccaatgacctcttaaagtgatatttctttttctttttgttgagatggagtctcactcactctgtcacccaagctggagcgcagtggtgtgatcttcagctcgtcccaacctccgtctcccaggttcaagcgattctcctgacctcaagtgatccgtctgccttggcatcccaaagtgctgggattacaggcctgaggccaggccctgaattaattttttgatgtttcactttgccaggtgtataagtaacatgttagttgtgattgtaactaaataaaggcttaagggaaaccgtgtttctaaatttctaaattgactacacatttacaaaggaacccacaaagatggatttttgggccgggcgcagtggctcacgcctgtaatcccagcactttgggaggctgaggcagacagattgcctgagttcaggagttcaagatcagcctaggcaacaaggtgaaaccctttctctactaaaatacaaaaaaattagctgggcatggcagcgagcacctgtaatcccagctacttgggaggctgaggccggagaattgcttgaaccagggaggcagaggttgcagtgagtcgagatcacaccaccgcactccagcctgggcaacacagtgagactcgatcttaaaaaaaaaaaaaaaagatggactttttcggggccccaaggcttcaaaattcaaaatgctgtcatgagttagtttgatttgaggaaccaaaaattggcttttgtggctggagcagagtgagcaagggggaagtgaatccggaaggttgagtctgcaaggtcaagggcaaggaacagagaagggtgtgggtggggcaggttgcgtgtgctcttgggggctgcagggaagggggcttttatctgggtaaggtgggagccacagagggttctgatcagagggacagatctgacttagattttgcatgatgtcccccagctgtgggctgcggggcatgggctgctgaataggtggtttaggtgggcaaagatgggtcatggtgccccctaccctttaaaaattaaaagacagggccaggagcagtggctcacgcctgtaatcccagcactttgggaggctgaggtgggcggatcacctgaggtcaggtgtttgagaccagcctgaccaacaaggtgaaaccccatctctactaaaaatacaaaaaaaattagctgggcgtggtggcagccacctgtaatcccagctactcgggaggctgaggcaggagaatcgcttgaacccgggaagcagaggttgcagtgagccaagatcgtgccactgcactccagcctgggcgacaagagcaagactgtctcaaataataataataggccgggtgtggtggctcacacctgtaatcccagcactttgggaggttgaggtgggtggatcactggagcccaggagtttgagacaagcctgggtgacacagtgagaccccatctaaattattattattattattatttgagacagagtcttgctccatcacccaggctggagtgcagtggcgcgatcttggctcactgcaagctccgcctcccgggttcacgccattctcctgcctcagcctcccaagtagctgggactacaggtgcccgccaccacgcccagctaattttttgtattttttagtagagacggggtttcaccatgttagtaaggatggtctggatctcctgaccttgtgatccgcctgccttggcctcccaaggtgctgggattacaggcgtgagccaccatgcccagcctgaattttttttcttaaagattaaaaaggcagagcctctctgctcctcccatttgacagacagccacatcttttcatgcagtgaaaaaggcatgtccccgagacaccgtggtgaaagtgaagacaggagtaaatggatttggccatattgggtgcctggtcaccagggcaccagagctgcttttaactctggcagaatggatgttgtcacctcaatgaccccttcattgacctcaactacatggtctacatgttccaatatgattctacccacggcaagttccgcggcaccatcaaagctgagaagtgggctgggtgtggtggctcatgcttgtaatctcagctacttaggaggttgaggtgggaggatcacttgagaccaggagttcaggaccagcctaggcaacatagggagatcctctctctcttaaaaaaaaaaaaaaagaaaagaaaagactgagaaagagaagggaagcttgtcatcaataggaaatgggaatctcatccccatcttctagaagccagatcccagcaaaatcaaattgggtgacgatgctggcactggttatgtcatggagtccaccagcagcatcttcacgaccatggggaaggctggggctcgcttaggatgggcagccaaagggatcaccatctctgccccctctgcccatgcccccatgtttgtgatggacatgaaccatgagagatacaaaaacctcatgatcgtcagcaatgcctcctgcaccaccaactgcttaccctccggccaaggtcatccgtgacaacgtttttttttggtttggtttggttttctttctttcttttttctttttttgttttaaatagggatggaggccaggtgcagtgactcatgcctgtaatcccaacactttgggaagctgcggttggaggatcacttgagcctaggagttcaagaccagcctggccaacatagcaagactctgtctctacaaaaagtttaaaaaaattatccaggcatggtggggtgtatctgtagtcccagctatttgagaggctgaggtgggagggttgcttgagcttgggaggttgaggctgcagtgagccgggtgacggagtaagaccctatttcataaataaataaatagagacgggggtctcactttgttgcccaggctggtcttaaactcctgggctcaagtgatcctcccactttggcttcccaaaatgctgagattacaggctgagccactgaccctggtcatccatgacatctttggcaacatggaggggctcatgaccacagcccctctgggaaactggcgtgacaaacatcatccctgcatctactggcacggccaaggctgtgggcaaattcctgcactgaacaggaagctcactggcacagccttccgagtccctgccaccaatgtgttggtggttgacccgacctgccatctggagaaacctgccaaatatgatgacctcaagaaggtggtgaaacaggcattgggggggccccctcaagggcatcccgggctacattgagaacaaggttatatcctccgcctttgtttttaaattatatttatttatttttttgatagggagtctcgttctgtctcccaggctggagtgcagtggcgcgatcttggctcactgcaacctccacctcctgggttcaagcaatcaattctcctgcctcagtctcccgagtagctgggattacaggcgcacaccgccacacccagctaattttttgtatttttagtagggatggggtttcaccatgttggccaggctggtctcaaaatcctgaactcaagtgatccacccgcctcagcctccgaaagtgctgggattacaggcctgagccaccgtgcctggccgtctcctctgacttttaacagcgacacccatccttccaccttctgtgctggggctagcattgcccttgatgacactttgtcaagttcatttcctggcatgacaatgtatttggcttcagcaaaaaggtggtggtccacactgtctccaaggagtaagaccctcagaccaggagccccagtgacagtatgagaggaagagagaggccctcagctgcttgggagtccctgctgcactcagccccccaccacactgaaaatctccccatacacagtttccatgccagaccccctgaagaacagggcctatcaataaagcagtaaggtcctctgtacttagaccaaaaacaaaaaaaaacaaaaaaaaaacaaaaaatgaaaattactcttgcctgtaatcccagcatttagggaggctcaggtgggaagattgcttgagcctaggagtttgagaccaacctgggcaatatggtgagactttgtctccaatatagatagatgatagacggatggatagaagatagacagattagacagagagagagagagaaaggagagagagagagagagagaaaagaggggaggggaggggaggggaggggaggggaggggaggggaggagaggagaggagaggagaggagaggagaggagaggagaggagaggagaggagaggagagagaaattaggcagaggagaggagagagaaattaggcagatgccttgggcagtgaagtccctggggatggtctactgttcccgcagcctgagcgcctttttcagacgtttttatctgtccactgctgcccctgcatggccacagcctgaactgcagcaccgaacgcagacccagtttcccttttggagaagaaattaatgctccttccagccccccacttgccactaggcctgtgcagggcgtggacagattctacagtggatccagccagagactgccccagagaaaattccaggggtgggatgagtgaggtatgctgggactggaatgtttgtaggataacatgatgagcagccggattcccaggaaattgcaaaccgtgtctgctctggtgagattctcagaggaggggatctataggcagttctgagtaggcactgggtaaaagcctggaaagaggaccctggcttggatggggctctgcctcactcgccatgagctccttggcgctatcagtcagcacagttcagctgcatgggtgtgaaggtgtcctggtgactggctacccccatgcctgcctcagtgcacgggaggtggaattatggatttggtggggctcgcacaggctaagggactgattttcagtctggagaatgggagggcaggatgagctgtggagggtcaggctggtggtttggagggtggcatgatgtaaatgtagctgttcactgttgtagtttgctgccaccagttcagtctggctaggttccaggtgggtcaataatctcaaatggggctgggctcagtggctcacacctgtaatcccagcacttcgggaggccgaggcgggtggatcacttgaggccaggagttcgagactagcctgcctaacatggtgaaacctcgtctataccaaaatataaaaaattagccaggtgtggtggcgggcgcctgtaagcccagctactcgggagactgaggcaggagaatgcttgaacccagggggtggaggttgcagtgagccaagatcgtgccactgcactccagcctgggcgacagagcgagattccaccaaaacaaacaaacaaacaaaatcccaaatcgggagaggtgaggtggggtctgtcatgccaaggagttggtttctttcttttttttttttttttttgagatggagtctcagtctgtcacccaggctggagtgcagtggcgctatctcggctcactgcaagctccgcctcccgggttcacgccattctcctgcctcagcctcccaagtagctgggactacaggtgcccgccaccacgcccggctaattttttgtatttttagtagagacgggatttcaccgtgttagccaggttgctctcgatctcctgacctcttgatccgcccgcctcggcctcccaaagtgctgggattacaggcgtgagccaccgcgcccggccaggagttggtctttatattacctaactcccacctctttcctcaatgatttgaacgtttgatcatttgaatgtttgaatgtttgatcctcgtgatcaaacattcccgttactctctagaccccatcatgctcccccaacccctccccacatcctctcagatatccaccagctctagcccccagagtaaaaacatccatcgtctccaccatcaagtgaaagcaaatggtgacttccttgcctcagccattgctgagccagttggatggcaaggaggaaaaccccacccaagccccacctaacccctgtcctccttttcatcccagccggtgcccactgattccatggttacctgacttatccactccagctcctggtccttctatcctgggtaccgctgaactgcttgggagtagcaggctgagaagttctggtgcccctcctgcagcaaggctgtcagcgggcacgggaggatgcggggaccggctggagtaagccatagccagggcaggaaggagccccacacagatctccctcagctgtgaactccacaacgacccacctcacagtcaacaacaccaatggacactcgttcctctaatcccgttattactaggcacccatttctctccacccaaggttttgttcaccatcctcaattatttattatttttttgagatggagtccaggctgaagtgcagtaacgcaatttcggctcactgtagcctctgcctcccgggttcaagcgattcccctgtctcagtctcccaagtagctgggattacaggcccccggcaccacgcccagctactttttgtatttttagtagagacggggtttccccatgtttgccaggctggtctcaaactcttgacttcaggtcatctgcctgcttcggcctcccaaagtgctgggattacagacgtgagccaccacgcccagccggtacccccaattatttcagtattcatgatccgcaggaaggaatacatatgttttgttgttgttgttgttgttttgttttgtttcttttgtatttttagtagagatgggattttgccatgttggccaggctggtctcaaactcctgacctcaggtgatcctcctgcctcggcctcccaaagtgctgggattacagttgtaagccaccatgccaggccatgaatacatatgttttattgagttctttttttttttttttttttttttttgagatagggtctcactctgttgcccaggctagactgcagtggcaccatctgctcactgtgacctcgacctctcaagctcaagcgatcctcctacctcagcctccccagtagctgggactataggcgtgcaccaccatacctagctaatttttgtattttttgtagagacagggtttggccatgttgcccaggcttcttctttttcaatgaatgtatttacagctataaatttttccttctagcactgctttctctgcattccatacattttgatatgttggattttcatatttgtctcaaggttgtttttattttttattttatttatttttatttttatttttttgagacaatttccctcttgttgcccagtctggaatgtaatggcatagtcttcgctcactgcaacctccgcctcctgggttcaagcgattctcctgcctcagcctcccgagtagctgggattacaggtgcccgccaccacaccgggctaatttttgtatcttttgtagagatggggtttcaccatgttggccacgctggtctcaaactcctgacctcaggtatcagcctcccaaagtgctgggattacaggcatgagccaatgtgccccgcctcaatagcctcaagcaatcttgtcacttcaatcccctaaactgggactacagggaggcaccactgtgtctggcttggatcatattttaaacatctattctgcctatctctgttttttgattggaaagtttaacccatttcaatttaaaggaattcctgaggtggaaggcccaacttcagccattttaccatttgtgttctgtgtgtcttggagcttttttgttctttatttcttccattactgccttcttttctgtttacttgactttttgtaatgagactttttgattctcttatttcctttcgtgtattttctatagatattttctttatggttactatggggattacatttgacattctaagttataataatataactttattttattttattttgagacagagccttatctgtcacccaggctggagtgcagtggtgtgatcatggctcactgcagcatcaacctcctgggctcaagcaatcctctcacctcagcctcccgagtatgtgggactataggtaagggccaccatccctggctaatttttaaaaaaaatttttgtacagacaaggtcttactatgttgcctgagctcttgaactgctgagctcgagtgatcctctcgcctcagcctcccaaagtgctgggattacagacatgggccactgttcccagcaaaggtttaaatgatacctatttaacttcaatagcatagaaatattctattctattaattgagaactagtcttgctatgttgcccaagcttagatttgaactcctgggctcaagtaatcctcctgtttcagcctcccaagtagctgagactacatgcatgtgccattatgcctggttatggtataaacatactctatttccttttttcttttctttttttttttttttttttttgagacggagtttcgctcttgttgctcaggctggagtgcagtggtgtgatctcggctcaccgcaacctctgcctcctgggttcaagcgattctcctgcctcagcctcctgagtagctgggattacaggtgtgcgccattacgcctggctaattttgtatttttagtagagacagggtttctccatgttggtcaggctggtctcaaactcccgacctcaggcaatccgcctacctcggcctcccaaagtgctggaattacaggcgtgagccaccacgcctggcccagatactctatttttatagtttcctcttcttttatgttattttttaaaatttttatttacttatttatttgaggtaggatctcactctgtgacctaatctggagtgcagtggcgtgatcacggcttactgtagcctggaccttccgggctcaaacaatccttccacctcagcctcccaagtagttaggaccataggtgcccaccaccatgactggctaatttgttaatttttccatagagataaggtctcactatgttgcccaggctggtcttgaactcctgagctcaagcgatcctcttgcctggactcccaaagtgctaggattactggcgtgagccaccgcccccggctcttttatgttgttaatgtcacaaatcacatctttatatattgagtgcccaatatcatagaaatataattatttttattacttttcttgagaaagcatctcgctcttgttgcccaggctggagtgcagtggcgtgatctcagctcactgcaacctccacctcccgagttcgagcgattctcctgcctcagcctcccaagtagctgggattacaggcatgtaccaccatgcacagctaattttgtatttttagtagagacagggtttctccatgttggtcaggctggtccggaactcccaacctcaggtgacctgcctgcctcggcctcccaaagtgctgggattacaggcatgagccaccatccccggctttctttttttctttttgagacagagtctcgctctgtcacccaggctggagtgcagtggtgcgatctcagctcactgcaacctccgtctcccaggatcaagcaattctcctgcctcagcctcctgagtagctgggattacaggcatgctccaccacatgcggctaattttagtatttttagtagagatggggtttcaccatattggccaggctggtcttgaactcctgacctcaaatgatccacacacctcggcctcccaaagtgctgggattataagcatgaggcaccgtgcctggccggtcttttcttaattctttttttctgggcctctgtggtaactgtaatttcctctgtggctgcctttgaatgacctaattgtcaatgtctgggtcccaagagaaaaataaaataacaaaagtgcaaaaagaaaataaaatttcggctgagcgaggtagctcttgcctataatcccagcactttgaggggctgaggtgcgaaaatcgcttgagttcaggagtcctagaccagcctgggcaacatagcgagacattgtctctactaaacctaaaaaaatattatccgcgtatggtggcacttgcctgtggtcccagttactcgggaggctgaggtggggggattgcttgatcccaggagatcgatgctgcagtgagctataatagcaccactgcacgctatcctgggtgacagagcaagaccttgtcttaaaaaaaaaaaaaaaaaagaaaaaaatcaataccttccaaattcattatgcgaaggggaaaattaagcacttaagtcctagaaactgagtcttataatacagcttctctgatgcatgactgatgcttccttacctttgttttgagactgtagccatcagactccttgttcttcattcaaacctatactaaatgatgtaggatatgtatacccttgcgactgttaccgctttacaatagaatgttaagcaacccccatagagtgtaatcaacagtagtcaatcacatctgtttttttttttattttaatttttttttttattttgagacagagtcttgctctgtcacccaggctggagtgcagtggcatgatcttggctcactgcaacatctacttcctggattcaagccattctcgtgcctcagcctcctgagtagctgggattacaggcatgtgtcactatgcccagctactttttgtatttttaatagagacagattttcactatgttggccaggttggtcttgaacccctgacgtcaggtgatccacctacctaggtcttccaaagtgttgggattacaggtgtgatccacggcacccagcctcaaatcttatgtctgtatattaacatctgtatggaaatgtatttctgttcagcacctctgtttttgcctatatagacaattttcacttttccccacactgggatcattgatcactattcttcggtgtcagcatgtccctgatggccacccttgtactctgtgtttgaataaactcttttttttttttttttttgagacaaggtctctgtcatctaggctggagtgcagtggtgccatcatagcttactgcaacctcgatttcctgagatcaagtgatcctcccgtcctagccccccgagtagctgggactacaggtgcaccctatcatgcccagcttattaaaaacaatatatttttttgagagacagggtctcactatatggtccaggcgggtctcaaactcctgtgctcaagccgtcctccagccttgacctcccaaaatgctgggattatagatatgagccactgtgcctggccttgaataaactattttaactggatcttgagcctttcgattattttaggttgacaaagggaaaaaaataaaaggcatcagctctttatatcccccaccacgcctggctaattttttgtagttttagtagagacggggcttcaccgtgttagccaggatggtctcaatctcctgacctcctgatccgcctgcctcggcctcccaaagtgctgggattacaggcatgagtcactgcacccggccaatttttgtatttttttgtagagatggggtgggagggtttactatgtggcccagactggtttcaaactgctaggctcaagcaatcctcccgtcttggcctcccaaagtgctaggattggaggcatgagccactgtgctcagcccctggctaattttcatattttttaaatggggttaggggttggtctcactatgttgcccaggctggtttcaaactcccgggctcaactgatcctcctgccttgacctcctaaactgctgggattacaggcatgagccaccatgcctggccatagattctttatgatttttattctgccatcttccctgaatcctccaacctgccttttttttttttttcaggcaaagtcttgctctgtcgcccaggctgatgtgcagtggcacgatctcagctcactgcaacctccacctcccaggttcaataattttttgtatttttagtagagacggggtttcactatattggccaggctggtctcaaactcctgacctcgttatcctcctgcctcagcctcccaaagtgctgggattacaggcatgagccactgtgcccagcttaacctgcctttttttttgagacagtttctctcttgttgaccaggctaaagtgcaatggtgtgatcttggctcaccgcaacctccacctccccgattcaagcgattctcctgcctcagcctcccgagtagctgggattacaggcatgtgccaccaggcccggctaattttgtatttttatttatttatttattttattttatttatttatttatttttgagacggaatctcgctctctctcccagtctggagcgcagtggcgccatctcggctcactacaagttccgcctcccaggttcacgccattctcctgcctcagcctcccgagtagctgggactacaggcgcccactgccacgcccggctaattttttgtatttttagtagagatggggtttcaccgtgttagccaggatggtctcgatctccagacctcgtgatctgcccgcctcggcctcccaaagtgctgggattacaggcatgagccacggcgcctggcctaattttgtatttttagtagagatggggtttctccatgttccgaactcccgacctcaggtgatccgcctgcctcggcctcccaaagtgctagattacaggcgtgctccatcgcacccagcccaacctgccttttaatactaatacattactttgggtctcatcccacatcacttcatcagagagcatccttcctctcacctcagttatttctacttttttttccacgtatagatgttttttcagggaccggagggtatgggaggaagccttggcacgcctcatcccaaatgcccgtttcccggaacatcaggcccttcctcctcttcctgtcctccctggcctagcctgggctccctcccgttctgaggcaaggcgattgctccatgtcacagtgagtgtggagttccctgcacatactggtgaccttgtgtccggaaggaattagaaggaagagctcatggagtgccagaagaagacagtgcctactctggcaagctagaagcaagctctgcattaaatgcaaatattggccgggcacggtggctcacatttgtaatcccagcacctggggaggcctaggcaggaggatcacttgagcccaggaattcacgaccagcctggtcaacatagtgagaccccatctaacccaccccacccccgtcacacacacagcaccaacaacaaaataaaattagcagagtgtggtggggcgtgactttggtcccagctactagggaggctgaggcaggaggatcgtttgagcccgggagattggggctggagtgagccgagatcatgccactgcagtccagcctgggtgacagagcaagaccctgaaagaaaaaaaagaaaggagggagggagggaggatggaaggaaggaaggaaggaaggaaggaaggaaggaaggaaggaaggaaaccaaaacaaggccacgcgtggtggctcacgcctgtaatcccagcactttgggaggctgaggtgggcgtatcacttgaggtcaggagttagagaccagcctcggtaacatggcgaaaccccgtctctacgaaaaatacaaaaattagccaggcgtggtggcgggtgcctgtaattcagctactcgggaggctgaggcacgagaatcgcttgaacccgggaggcagagattgcagtgagctgagatcgcgccactgcactccagcctgggcgacaaaagcgaaactccgtctcaaaaaaaaaaaaaaaaaaaaaccaaaacaaaccctcaaatatccctcgggctgggtgcagggaggaaactcggcctgagaggcgcagtggctagaaccagtcaacactgctacgcacagccacgtttccatggcttcctacgtcactcaggccttagggggcggggtatgtcaccctatccaatcaggggcgctggggcggggccctgccaactgtccattcagatgggcccgggagaggagggcagggcctgcgcctccctacggagcctttgtttctggcgaccgtccccacccgggctcgcgtctccgtttctccgagaggcccaaggtgtctccgccgcagcctctgtcgcgccgtgacctgtacaggtcgcgggagtcgtagggaggacgccgggacacctggaagccgagaaatggtgcgtgtgaggggtcaggcgtccccagacctgggggaggggctggttggaaccggccggaaccggctgtggagggacctaggcctccctgcggcgactccggggtctgggacccgagttccctcggccgcaaggtggggctgggccaggagctgggaccccggtcgtcctgtcccgtccctgcgcgacgcctgcggccccgcagccccgcgtctccccacatggtgcgggggccgcgggagggtcatgggggtatccctcctcggatgtggttcgtgttgcaggagctgcggtctgtggccgccccccacagtcccgcctttctcccgttaaaaatttagagtttatttgagcaaacagcggctcatcgatggagaagctcccggtcgtggtttgtggcttggggatccgttggagggaatggaaggaaaggctgtaaggtgcaggaggaagcgaaccaaattcagtacttggttggtgacagttatgcagtcgccttatttgctctatctaggtggacattttctgcttatgtagtcagaggtggattggtggttgtggtttattaaccctaaattttatttccttataaactggtaatttataagaatttcatttgaggctggagcgcggtggctcacgcctgtaatcgcagcgcttttggaggccaagacaggaggatcgcttgggcccaggagttgaagatcagcctcgcaatatagcgagaccccatctctgttaattttttttaaatgaacatattcagactgagaccaaaaaactactacaaatttttaaaatataaaatcaaataaaagaatttcattcgacttagatttctgtttccttgggtaggaaaccaggacaccatagccacagccctctaattgtctccaaattaattattttaacactccccagggggacagggtcccaaatccttgaccttgttcccctagcctgactcctctggcgcttgcaaataattcttgataccacttctttcaccatattcccaaaaggtaactccagtcacgacattatcaactctttgtcctttattgcacatttcaaactaattaatttgtattattttttcaaggagcaatcgattggtcttttaaaaatatttgctttctgtttctgaacatttcacaggagaggaaagcagagaatacatgtatgagaccctgctgtgaaaaaacctttgtgcctcttctccttttctctctcctaggcacagggatgttctcagaatgtcttttggttggcctggtgccatggctcatgtctgtaatcccaacactttgggaggccaaggcgggaggatcacctgaggccaggagtttgagaccagcctgagcaacatagtgagacccggaccctaaaataaaaaaaacaaaaaacagtgtctttgggttggggttcccctttggaaactttaaactgtgatatgtcttcagagcatcctcctttcctggtcctgggcttcagggctgtttgggctgacacaggatgcccacagcagccagatctgttgaagggtctggtatcagcctgctcccactggacagcctgaagtacggggtggggcctcttagtggaggagctgggtgtcctggggtcggaggaatctcttgatatcccctccctctcaaagctcacccctgggacactcagcttttcttcccctaattccagatcccattccttgggggacacattggtgtccagccaaatggatgatggtattgaggggaaaaacagatatgattcttgccctctggattcttttagactggtgaagtgagaaaacttatcccaaggacaggaaaacccatcccactgaggtgatgcaagaacttgaaaagcaaaatgtacttcaggcagatggaggcaaaatgcagtgtctcttggaagggtggtcactgagcccttcagtgagcaggttagggggtggacgatatcccaggtgatagaatgacctgacttaggccgggcgcggtggctcacacctgtaatcccagcactttgggaagctgaggtgggcggatcacttgaggccatgagttcgagaccagcccggccaacatggcgaaaccctgtctctactaaaaaatacaaaaattagctgggtgtggtggcaggtgcctctaatctcagctactggggaggctgaggcatgagaatcgctttaacgtgggaggcaaaggttgcagtgaaccgagatcacaccactgcaccccagcctgggtgacagagcgagactctgtctcaaaaaaaaagatgtgaaacttgagtcagacgtacctctgttccaggttagcgcagccccttcctgggtttgtcccctgcaaaagatttgttcacttattgcagtttcagtttttttcttttttaagtaactataaatgtatttcatcagtagaccttgaaatataagacagttttgcaaagaggcaagaaggaagtggatttcagaaaacattaaatatctagtcttatgtttgttaaaaattattacttatggctgggcgcgatggctcacgcatgtaatcccagcactttgggaggctgaggcaggcagatcacgaggtcaggagatcgagaccatcctggctaacacagtgaaaccctgtctctactaaaaacacaaaaaattagctgggcatggtggcgggtgcctgtagtgccagctacttgggaggctgaggcaggagaatggcatgaacctgggaggcggagcttgcagtgatccatgattgcgccactgcactgcagcctgggcaacagagcaagactccatctcaaaaaaaaaattattatttttttctttcccaaagcaagtgtagtaagtttctcaagtatgttgtttttttttgtgggggtggggtgtggtgatttaaaatggaattccagggcttagtgttgggaatactaaggaaaagagagagagaaaactctcttctatcatgactgcagaaaatgaatacatttccacaagtaagtgtagcaaataaattggtgaattacagagattcaccaaaacatcaattcctctgctttgcagggtggcaaacttgtgacagtggataactgttctcttcctgttatctagacatcagagtttaatgcgaagtcctagtaggacaggacttggtaactcctagaagtgttccaatatgatttagtacatgatttgttaccatagaaagaataaataacatgtttattgtctgaagaggatggatacttttacttttcctgttaaggtatgaaatataagtgccttacaatttccttccttgctataaacagtgaatttgagtgattttactggaatcttcaaaccctgggtattttctcattgaaaattaaatgcataaccttgactgggaaacagagacagcagactagtgacttgaaactaagaccaatcttgagccttcaaagagaggacattacaggcccagtggttcttgctgaggagcctcccctgcagtgtcccagctgctcacaactgactttgggtggagccctttatagtgagagaagctcagagccctggaaagctggggattcataggcagaggtggttgaggtgatgcctttctgagaatgtacttgctattatcttgggtctgtttgtagacgtttctaatgaaacaaatctggatttaggtaaggagtgatttattttatttttatttatttattttttttgtgtgtgacagggtctcactctgtctcctaggctggagtgcagtggtgcgatcatagctcactgtagccttgatctcctgggctcaaggaattctctcacatcagcctcccaagtacctaggactaaaggcatgtgccatgatgcctggcttatatttttaaaaaagtttttttaagagagacaggacgttgttatgttgcccagactggtctctaactcctggcctcgagcaatcctcccaccgtagcctccccaaattccaggattatgggggtggggcggggagcaccaccacaccagacaggaatgactattctaaaggataatcgaaaggggagaaggcaccaagtataaaatcttcaagcatctcaggctgggcgtggtggctcacgtctgtaatccatgcactttgggaggccgaggtgggtggatcacaatgttaggagtttgagaccagcctgaccaacatagtgaaaccccatctctactaaaaatacaaaaattagccgggcatggtggtgcgtgcctgtaatcccaactactcgggaggctgaggcaggagaatcgcttgaactcaggaggcagaggttgcagtgagccgagatcgcgccactgcactccagcctgggcgacagagtgagactctgtctcaaaaaaaaaaaaaaaaaaaaaaaaatctgcaagcatctcagagtttatgcagaaaaggattttcttttgtagggaggagcaaatgatgagaaagaaggtgggaggtggaaggcaggatgcagggtgcaaaatcccacctagatcctgaaggcagtctcttcttaggagggtcatcagaggggttgtatataggctcaggctgggggtgggtcaaagttcaggggctggaggaagaagagaaacttaaccaaagttttgttaacaggtactttgttctgactgatcactgaagacagagctgttcagctaatcaattgtgaggaaaataaagggaatttctagtctgtgtatggctttgtcataggtaaaaaagcagtgtcatctaagtcataatgagaagagtgtttctttgcgtaacctgctcctgcagaatacaaaagacgggggagtttctttaaccatagctatttccaggattacatacctgcccaatcttctgccgccattttcccttacatccatcccttccatttcgccatttctgatttatatgcagttgctgagaagtatgggtgatccctggggcttgtgactggcatctgcagtggggcactgttatggtaatgagccctgaacttgtggggtccccgttaactctgggtagtgtcagaattgatttgaatgcttaattggtgttggagaattggagatttggttgtgttcagcaaacaccacacatttggtgtcagaaatggtatatgaaaaaagacactagagatcagaaccttcacctggctctgggtaagtgttcgctggtgagaattgagaccctggaggagggagcatttccacactgtgaggagaggagagtgggttgtgtgaaacacctgtggactcactacccaggttcataaatgggcattgggcatttctggtatgtcctgatcttgtctcccgtctgtacccacaggtgaccaggtcctcatttttaaaaggtggttcttcatagttttaccatctatttatcattaggctgaattttgcttggctcttcctcttttgaatttttagtaagttattaccattaatattatgccaaaaagagtttttttttggtttctttgcctgtttgtttcacgcatgctggtttctgcatttagtttgggggttaggatttcagcaaatgaaagtttgggcaggggatggtggtggaatacaaacattcagtctgttaacaatcctaactgtattttgtacgacatcttggctattcttagccttttttttttttttttttgagatggagtctcactgtgtagcccaggctggagtgcagtggcgctcttggctcaccgcaacctctgcctccgggctcaagtgattctcccacctcagtctcccaacaagctaggactacaggtgcacagtaccacaccagctaatttttgtattttttttttttgtggaggcggggttttgccatgctgtctaagctggtcttgaactcctgggctcaagcagtccacccagctatgcctcccaaagtgttgggattataggtgtgagccactacgcccggccttatttttgtctgttttttgtggaagtgatatcatcctatatgttatattgtatgccatctgtctatttcacatagctgtgaatcttccatgaaatggtattttattcactattttacttaataaactttattttttagaccggttgtagtttgacagaaaaattgaacagataatacttagagtttccttattctcctccacaggtgattgttttcccctacttttctttttttttaagagacgaagtcttgctctgtcacccaggcttgagtgcagtggtgcgatcactgctcactgcaggctagacctccagggctcaagtgatcctgccgcctcagcctcccaagtagctgggaccacaggtgtgcaccaccacatctggctaattttttttttttttggtagatgggggtctcactatgttgtccaggctgatctctaactcctggctcaagtgattctcccatcctggcctcccaaagtacgtaaatatgatatcatatatatcatataattgatgaaccaatatatcatatatgatgatgatcagaattggtgagccaatatgttactaactaaagtttacacttcatcaaaattggtaatttttgttcttcaaaggacaccaagaacttgaaaagataattcaccaagtggaagaacgacttgcaaatcctgtgtctggtggggcatcttatccagaagcagcctgagtctcagtcccctccatcacactccatcagggtgggggctgaattggcagccaggactcccaggtatcctgtcccatcactgtaggaggcagtctacctcctggacctctctctgggcagttgtgcacctgcaatcctggatctcacccagatcatggggtgacaacagggagtggccatccagagagaaatctgagcctggtgttttgggtttgtgggtgggaggtactctcaggacaccctccccctccatggattcagacttgggtgggcccagcagaatggcatgtgtggttcccagctccttcatccccagtgggagggagcctgtcatcccctatgcatttcagataaatgaaccagggtctcaagtttacagccttgttccctgttaaagagagattgcactggaaacttgttaagaatgtcaaggaaaagtttattaagcacaattgcagtgagtcatgacagctgtaataggggagggagattgaattcagccttgaatgcagcaggaatattattggatttatagccaatgtacaaggtgagggagagaatggaacttggttgggtctcataggtgggagaaaaagaacttgattggatattaaggtaggaggagtctctataaactaccttagatggattcttgctgaaactgacttctgcaggccagtgccaagccctagtcaaaaagagggctctgaggagcttgactcaagtttggtgaaggaaggagtacttgagacctcttcagcctagtttttctttctttctttttttttttttttttttttgagatggagtcttgctctgtcacccaggctggagtgcagtggtgcgatcatggctcactgcaacctctgcctcccaggttcaagcaattctctgcctcagcctcccaagtagctggggttacaggtgcccaccaccaggcctgactaatttttttttgtatttttagtagagacaaggtttcaccatcttggccagggtggtcttgaactcctgacctcatgagccaccgtgcccagcctcttcagcctagtttttcccagggctctgtattagtctgttttcatgctgctaataaagacatacccaagactgggtaatttataaaggaaagagatttcattgacaggtcagtatggctggggaggcctcaggaaacttacaagtatggtggaagggaagcaaacatgtccttcttcacatggcagcagcaaggagaagtgcagactaaaggtgggggaaaggtgggggaagcccattataaaaccagatctcatgagaactcactattatgagaacaacatggaggtaaccaccccaatgattaaattatctcccacttgctctctcccatgacattcagggattatgggaactacaagaggagatttgggtggggacacagccaaaccatatcattccacccccagcccctcccaaatctcatatcctcacattttaaaacaatcatgccctcccaacagtcccccaaagtcttaaatcattccagcattaactcaaaagtacaagtccaaactcatctgagacaaggcaagtcccttctgcctatgagcctgtaaaatcaaaaacaagttagctacttcctagatacagtcattgggtaaatatacccattccaaatgggagaaattggccaaaacaaaggggctagaggccctatgcaagtcccaaatccagtagggcagtaattaaatcttaaagctttgacataatctccttggccaggcgcggtggctcacacctgtaatcccagcactttgggaggccgaggcaagcggatcatgaggtcaggagatcaagaccatcctggctaacatggtgaaaccctgtctgtattaaaaatacaaaaaattaggcatggtggcacgcgcctgtaatcccagctactcgggaggctgaggcaggagaattgcttgatcccagaaggcggaggttccagtgagccgagatcatgccactgcactccagtctgggtgatagagccagactctgtctcaaaaaaaaaaaagaaagaaaaaaagaatctcctttgactccacgtctcacatccaggtcatgctgatgcaagaggtgggctccctcaaccttgggcacctctgcccctgtggctttgcaaggtacagcccccactcctggctgctttcacagctggcactgagtgtctgtggcttttccaggtgcgtggtgcaaactgtcagtggattgaccattctggggttcttgaggacggatggtggccctctcctcacagctctactaggcagtgccacagtggggactctctgtgggggctccagttcccacatttctcttctgcgctgccctagcagaggttctccatgagggctccgcccctgtagcacacctctgcctggacacccaggcgtttttgtacatcttctgaaatctcggcagaggttcccaaacctcaattcttgtcttctgtgcacccacaggaccaacaccacatggcagctgctgtggcttggggcttgcaccctccgaagccatgacccgaattgtaccttgcctccttttagcaatggctggagtggctgggcacagggaaccaagtccctagggtgcatacagcaaggggccctggaccaggcccaggaaaccaaccattttttccttttaggattctaggcctgtgatgggaggggctgccatgaaggtctgtgatgtgtcctggagacattttctccattgtcttggtgattaacatttggcttctcgttactcacaaatttctgtagctggtttgaatttctccccagaaaatgggtttttcttttcttttctttttttttgagacagagtttcactcttgttgcccaggctggagtgcaatggcgcaatcttggctcactacaacctccacctcccaggatcaagcgattctcctgcctcagcctcccgagtagctgggattacaggcatgtgccaccacggccagctaattctatatatttagtagagaaggggtttctctatgttgctcaggctgctctcaaactcctgacctcaggttatccgcctgcctcagcctcccaaggtgctggattacaggcatgagccaccacgcctggctgggtttttttttctgttccattgtcaggctgcaatttttccaaactttaatgttctgtcacctcttgaatgctttgccgcttagcagtttcttccaccagataccgtaagtcatctctcacaagttcaaagttccacagatctctagggcaggggcaaaatgccgccagtctctttgctaaaacataacaagagtcacctttgcttcaagttaccaacaagtttctcgtctccatctgagaccacctcagcctggactttattgtccatatcactaccagcattttggtcagagctatccaaggagtctctaggaagttccagactttcccacatcttcctgtcttttgagccctccaagtctctaggacgttccaaactttcccacattctcctgtcttcttccgagtcctccaaactgttccaacccttgcctgttccccagttccaaagttgcttccacattttcaggtatctttacggcagagcaccccgctacccagtaccaatttactatattagtccattcttgcgctgtgaataaatacatacctgagactggataatttataaaggaaagaggtttaattgacatacagtttagcatggctgggaaggcctcaggaaacttaatcatgacggaaggaaaaagcaaacatgtccttcacatggtggcagcaaggagaagtgcagagcgaagagtggcaaaagccacttatgaaaccatcagatctcgtgagaactcactatcatgagaacagcatggagggaaatgcccccatgattaaattacctctcaccgggtccctcccacaacatgtggggattatgggaactacaatttaagatgagatttgggtgggggcacagccaaaccgtatcagggtcaaaataagttcctaagtttctggtttcccttgccacaatcccagatgtcaacttcccctctccagttgacattatcttcaattatgtctcccccatgctaggtttgaagcagctgtaatattttagttatttataattttccatagaataataaataacaattttaaagatttatctttttgtcagtgtatattttacatgagacaaaagctattcaagtggtgagtagccatttgaaattacattgtgtaaaatctgtgtccctaatgattcgtggtgttgagcatatttgtatgtgcttattggccatttgtatatatcctggagaaatgtccattcaagttctttgcccatttattatttatttatttttattttcacttttttttggaaagagctatgatgcccaggctggatttgaacgcctgggctcaagatccttctgccttaggttcctgaagctgggattacaggtgtgttccagcatgcccagccaattttgcccattttctaatcaatgtgttttttgctggtttattacaataacttattattattattattttttgagacagggtcttgctgcattacccaggctggagtgcagtggtgccatctcggctcactgcaatctccgccttctgagttcaagccatcctcctgcctcagcctcctgtgtagctgagactagagggcatgccaccatgctcagctaatatttgtattttttgtagagacagggttttgccatgttgtccaggctgatcttgaactcttgagctcaagctgtgtgcccacctcagcctcccaaaatgctgggattataggcgtgagccaccatgtccaacaatttattattattaattgtggctataaaaacaattaaaaatctaccatcttaagcatttttgtgtacagtttagtagtgttaactatactcaccttgttgtgcaaccaaactccagcaattgttcccattctctcaaatttattttttctttcttcaaggtggttaattttatcttcaagttagctgattcttattttgcttgcttgaatttgccattgaacacctatagagaaattttcattttagttgtgctttgcatcttccagatccgtacttcctgggtagtcttttaaaaaattttatatatatatatatatatatatatatatatatatatatatatatatgtattttttcccccccgagactgagtcttgccctgtcgcccagagctggagtgcaatggcatgatctcagctcactgcaacctccgcctcctgatttcaagcaattctcctgcctcagcctcccaggtagctgggattacaggcgcctgccaccatgcccggctaatgtttgtgtatttttagtagagacggggtttcaccatgttgaccaggctggcctctaactcctgaccttgtgatccgcccaccttggcctcccaaagtgctgagactgcaggcgtgagccaccgcgcctgtaattttttgttgatattattgcatgcatccttttcttagttttctttatttctttctccatggttgtctttactactttgagcatagttaaggcggttgcttaaagtcttcgtccagtgagcgcaataactggagattctcaaagatggtttatctcaattttttcccattgatgagccatatttttctgtcttctttatgattttgtttttgttgaaaagtgggatttgaattttttttttttttttttttttgagacggagtcttgctttgttgcccaggctggagtgcagtggcacaatctcagctcactgcaacctccgcctcccgggttcaagcaattcttttgaattcaagtcttttgaattcttctgagcccagaaaaggtcttttctggaaatgcgttctttcctggacatgaagggggcattctcaattccccagcatacctgggtttttctgagtatcctaatttctgaaagaaatttttctcctcagcttttcttcccaggctttagatggtctatcatatgtctcagccataatctgttggctcaggtagcttcagggtttttgtttactttatgacatttcaagcagttgctgcccttttttttcctcaaaaaataaaaataaaacagtcagatgtggtagtgtgcacctgcagtcccagttactatggaggctgaggtgggaggatcatctgagcctagggaggtcgaggttgcaataagtcgtgattacgccactgcactccagcctgggtgaccgagtaagaccctgtctaaaaacaacaacaaaaccttgtgtaactgctgctaattagagtatatattcagggcaacttgaatctgtactcctggtttgcagtcctcagctctggccccaatagactgtccatttgtattgattttgcctaagtttcttccttttagatcaacaaacttatggagcgcctttctgtttcatagatgggatgcttcttgattcgtgactcgctaataatagccaattagatcactgaactctttgttgaaatattttctttcttttttgagactgagtcttgctctgttggccaggctggagtgcagtggcgtgatttcagctcactgcaacctccacctcctgggttcaagcgattctcctgcctcagcctctggagtagctgggacttcaagcatgtgccaccacacctgactaatttttgtatttttagtagagacggggttttaccatgttggccaggctggtcttcaactcctgacctcaagtgatctgtccgccatggcctcccaaagtgctgggattacaggtgtgagctactgtgcccgaccccaaattcttgaccttcttgccaacacttgttctttggagtggttgatttttattgtgagtcataggagttttttatatgttcttgatactaacaccttgccagatatatgatttgctgatactttttacaattccctggttgccttttcccagtgttgatagtgtcttctgacacagaattatttatttagagacaaggtcttgctctgttgcctaggctggagtgcagtgatgatgtgatccgagctcaccccagtctcaacctcctgggctcaaggaatcctcttcccccagctgcctggcctacacaagtttttaattttgatgaaataaaatttgtcttttttttcttttgtgaaccatgttctggtgttttatccaagaaatcaatgccagacccaatagaaacttttgctgtgtgtttttgtttaaaaaggaaaattagaacagagttaaaagatccagttggcttttatttgcaattcatgaattggggtaccatcccattctataaaatagaataagagctcccgctgggcgtgacagaagggtgggttttgtaaggaacaagagaaacagaacaacaacaaagcagactggttaacatcaggttacttttattgaaagggtaaagcagaggggacgtccttattatgccagctgagattgactgggccctttcctattggttgctgtgagtctcctgttttggggaaaaactgggtatgtttgaggatctacctgcttctttaaaaattttagtttgattatgtggcacttagcatgagtgactccattttggtttggtctcatttgttggggactagtataggattttagtccaaaaaaatggcctgcataatttttactattttcttctaagagttgtttagttttagctgttacctttaggtctttgatccattttgatttcatttttgtatgtaagttaagggtccaactgcttttttttttttttttttttgagatggagtctcgctctgtcgcccaggctggagtgcagtggtgcgatctcagctcactgcaagctccacctcccgggttcacgccattctcttgcctcagcctcccgagtagctgggactacaggcgtccgccaccacgcccggctaattttttgtatttttcgtagagatggggtttcactgtgttagccaggatggtctcgatctcctgacctcgtgatccgcctgcctcggcctcccaaagtgctgggattacaggcatgagccaccgtgcccggcctgctttttttttttttttttttgagacagagtctcactgtcatctaggctggagtgcagtggggcaatctcagcttactgcaacctctgcgtgctgggttcaagcgattcttctgcctcagcctcccaagtttctgggactacaccagcccaccacgcccggctaatttttttgtatttttagtagagatggggtttcaccatgttgaccaggctggtctggaactcctgacctcaggtgatctgtctacctcggcctctcaaagtgctgagattacaggcatgaaccaccttgccgggcctcaactgcattttttcacatgtaggtatccagttttcccagaaccatttttttttttcaacttttatttttggttgagggagtacctgtgcaagtttgttacatgggtaaattgcgtgttactgggggttggtgtatttcatcacgcaggtagtgagcatagtatctgataggtttcttttccaccctcaccctcttccaaccctcccacttcaagtaggccgcggtgtctgttgttctcatctttgtactcatgtcatcaccattttttgaaaagtatttttttccaataatgaatctgggcacactcgccaaaagtcattttaccatttatgaatgtgtacctcccctcccctccctcccttcccccctcccctcccctcccctccctcccttcccccctcccctcccctccttcccccctcccctcccttccccccctcccctctcctttcctttcctttttcctttcctgacatagggtctcacttggtttcccagcatggtcttgacctcttgacctcaagccatcctctggtctttggcctcccaaagtgctgggattacaggcatgagctaccatccctggcctgaaggtggtatctgttaagagcaattccctgagcatatttcaagatgactactcttaccctcttcctgccataagcaggaagcaatttttctatgatcttcactgtgagaactgatgaagtttctggaggtagagctcacacatttctgggggccccctatgactggatcccctggatttttacctctttttttttaaaaaacagctaattaaaaaaaatatttagtagacaagaggtctcgctatgttttccaggtcagtcttgaactcctgagctcaagtgatcctcctgcctccatctcccaaagtgttgggattacaggcgtgagccaccgtgcccagccagatttttacacttagcctttagtaattcattagttgcaatttaggttttcctacccctgtactgcttcccacagagattttgctatgggagtctgttctagtaagttatgactcttttatcagttaggttggtgggatcctgtctaaaatccagtacccagatactgtcaaagctcaaactttgtgaacaagcatttctaaagatacacagtctcagggtggctaatgttaactcttttttctgcactctagttactagatttttttttttttttttttttttgagacggagtcttgccctgtcacccggtctggagtgcagtggtgcaatctcagctcactgcaagcttcgccttctgggttcacgccattcttctacctcagcctcctgagtagctgggactatgggcacccaccaccgtgcctggctaatttttgtatttttagtagagatggggtttcaccttgttagccaggatggtctcgatctcttgacctcgtgatccacccgcctcggcctcccaaagtgttgggattacaggcgtgagccaccgcgcccagccactacatgtttgttacaacaggtgctacaggcctaccttacagagagacattaggggtggcccaggcagtacatacttctcccaccagagaggcatgctcctattctgctgttgctagttcagttctagcagcagaattgctttgtggaaggaagtgagtctagacagagggtaagtttgatgactgtggaatcttgaaataaatgtttggaaagcatagcatcctgagaacttcttgggaataaagtctaggcccccagtgctgtctgtctcaaccttcctcctccacacatgggggatgtttcaggattcagtggcctttgaggatgtggctgtgaacttcaccctggaggagtgggctttgctggatccttcccagaagaatctctacagggatgtgatgcgggaaaccttcaggaacctggcttctgtaggtaagggtgacaatattcctttcctcagtgaattagagaacaagtgtttctagctccttaacactttggggaataaaccaggcatgggtacagggaattatgaatatagaatctaatacttttttcataattttatactaattcataatgacttttctgggtctaaattttaggaaaacaatgggaagaccagaacattgaagacccattcaaaattcccaggagaaatataaggtaatttgcactcacaaaagaaagttctgttccttgagagcatttcgtattgttaggaattttttttttttttttttttagatgaagtctcgctctgtcgccaggctggagtgcagtggcacaatcttggctcactgcaacctccgcctcccaggttcaagtgattctcctgcctcagcctcctgagtagctaggactacaggcacgtgccaccacgccgagctaattttttgtatttttagtagagacggggtttcaccatgttggccaggatggtcttgttctcttgacctcgtgatctgcctgcctcagcctcccaaagtgctgggattacaggcctgagccaccatgcccagcaggaatttttaaaagcaagcaaacaacatataagcccagcttcaaactgttttgtttttagaaaatcttctccaagccaggcatggtgactcacgcctgtaatcccagcactttgggaggctgaggtgggcagatcacgaggtcaggagatcgagaccatcctggctaacacggtgaaactccgtctctactaaaaatacaaaaaaaaagttagctgggtgtggtggtgggtgcctgtaatcccagctactcgggaggctgagacaggagaacggcgtgaattgggaggcagagcttgctttgagccaagatggcaccactgcactccagcctgggtgacagagtgagactctgtctcaaaaaagaaaaaaagaaaatcttctccaaaaacatagttaagtgtaacatagatgttcagtgtttgcaaaatagttcaattatagatagtattaagaaacttcatacgaatatctttttttttttttttttgagagggaatttcacaactcgttgcccaggctggagtgcaagggtgccatcttggctcactgcaacctccgcctcctggattcaagcgattctcctgcctgagcctcccgagtagctgggattacaggcgcctgccaccacacctggctaattttttgtatttttagtagagacagggtttcaccatgttggccaggctggtcttgaactcctgacctcaggtgatccacctgcctcagcctccgaaagtgctgggattacagatgtgagccaccacacctggccatgaatatcattttctttctttcttttttttttttttgagacagagtttcgctcttgttgcccaggctgaagtgcaatggcatgatcttggctcactgcacctctgcctcctgggttcaagcaattctcctgcctcagcctcccgagtagctgggattacacgcgtgctccactgcgcctggctaattttttttattttttatttttagtagagacagggtttctccacgttggtcaagctggtcttaaactcctgacctcaggtgatcctcctgtcttggccttccaaagtgccgggattacaggcataagctactgcgtctggccatgaatatcattttttgataataggtatggttgtgacctattgcagaccatttagtccactcatgttcaaacagttgagacaggcataaaacgtacactttccctggtaatgttaaacatgtgaatccaaggccaggcatggtggctcacgcctgtaatcccagcactttgggaggcagaggtgagaggatcccttgagccttggagttcagggttcacgcctgggcaacatagtaagattctgtctctgtatttaaaaacaagtatatgtaagtctaatacctattaataaatataaaatcatttataaacaaaacattaataatgtacttctcatttttctgacaagtcatattccagagagactctgtgaaagtaaagaaggtggtcaaggtgaagaaaccttcagccagattccagatggtattctgaacaagaaaactcctggagtaaaaccgtgtgaaagcagtgtgtgtggagaagttggcatgggtccttcatcacttaataggcacatcagagatcacactggacgtgaaccaaatgaatatcaggaatatggaaagaagtcatatacacgtaaccagtgtggacgagccttgagttatcatcgctcttttccagtacgtgaaaggactcatcctggaggaaagccctatgattgtaaggaatgtggagaaacctttatttctcttgtaagcattcgaagacacatgttaacgcataggggaggtgtaccttacaaatgtaaggtgtgtgggaaagcctttgattatcccagtttatttcgtatacatgaaagaagtcacactggagagaaaccttatgaatgcaagcaatgtgggaaagccttcagttgttccagttacattagaatacatgaaaggactcacactggagataaaccctatgaatgcaagcagtgtgggaaagctttcagttgttccaagtacattcgaatccatgaacgaactcacacaggagagaaaccctacgaatgtaaacagtgcggtaaagcctttaggtgcgccagttctgttcgaagtcacgagaggactcacaccggagagaaactttttgaatgtaaggaatgcgggaaggctttgacttgtcttgcaagtgttagaagacacatgataaagcacactggcaatggaccttataaatgtaaggtgtgtgggaaagcctttgatttccccagttcatttcgaatccatgaaaggacccacactggagagaaaccctatgattgtaagcaatgtgggaaagccttcagttgttccagttcgtttcgaaaacatgaaagaattcacactggagagaaaccctataaatgtacaaaatgtgggaaagccttcagtcgttccagttacttccgaatccatgaaagaactcacactggagagaaaccctatgaatgtaagcaatgtgggaaagccttcagtcgatccacttactttcgagtacatgaaaaaattcatactggagagaaaccctatgagaaccctaaccctaacgcttcagttgtcccagttctttcatgagcatgaaaggagtcacatagagaaaccccatgaaagtaagaaatttgggaaagccttcagtcctttctgtttctttcaactacgtgaaaggattcacagtggagaaagaccctgtaagataattggctttaaattacgagagacttgtgataggacagtaaaacctagagttggagttggatctctggattgtgttatgtcagtgttggtaggttaggaactagatttcccagaatccattccatttgtgattccatgatacaattcaccagtaacctatcttacatgagattcggaagtaagttaagaaggcattagtcatggtttggaagcaccatacagggagacagctgtgtgaatacaggctgtatggacacttgcttccatcccattttcctgcttctttgggttgccaatcaagagtatcctcaaaacgacttgactttaattttctcggaggtgataggcttccacacaggtctccagaagccctgcattgaatatccatccacactttggttttccttcagacattattatgtctgtactaggcaactaattcagactgtcctggttgggaatattctgtgatgctctgactcccctagtctgtagacggaattggcatacggtctaatttgtgtagtaagcacctttgttcatactagtagtgactgtattcttgattcagcctgatagctaccatgctgctgtcaaaaccaaccagaggggagcttgttcttctgctgtagtgtgcagtgactggcctcacccaggactttgatgtgagaatgagcactttcctctatcaggaaatttcaagtgtttcctgttattcgtagctcaatgtaatgcctcagttcattttcagttgtttgattatatgtgactaatatgtattttttattcaaacaagacttctgtacatgtttcttcaaaacagtttattaactgtcttcagtcttggattacatcaagtttataattttggcaaattgttaagacactgtgaagtcagcgttaaccatgtgcatacaacttaaggaattttttcctcctcatgtaaattttacttttcatgcttatatagtttcaacttttatcttcatagtaatttctcatctactcataataccaaaagttaagtcatgctgttttgtgtgctctcttgctaaagaccgcagagaccatacctgttgtcaaagagggtgtaataaactgtaataataatcatgaccacaaaccataaaggactgtgtgatgtatcagtaagagggtgctcagaagaatttcttacaggttttgtgcttgttataggttggttgatttctattttttttttttttttgatatagagtgttgctctgttgcccaggctggagtgcagtggtgcgatctcaactcactgcaacctccacctcccaggttcaagcaattctcctgcctcagcctccagagtagctgggatttcaggtgcacaccaccacactcggctaatttttgtacttttagtagtgaacggggtttcaccatgttggtcgggctggtctcaaactcctgacctcgtgatccacctgcctcggcctcccaaagtgctgggattacaggcatgagccaccgcacctggccaggttgattgatttatgttcagggaagcaagatgattctctgtatttgatgcagtgatgaggtaaacttaattctaaacttggtaatcataactgttcttatccagaagggaaaaggaatggagtggaggtaaacgtaattcatgagaaataccactcagtcatattagtgagaagaggggaatttgggtcatgtttatgatttggaacatgctgtctttcaccagttttaaagacatggttacagaatgccctttttttgtcttgattcatcatagccacctaggagcatggtctcacattgctggtgtctgacatgtttctctccaacagcgtaagacttggccttgcagtgagcggaggctggctcctggacttgtggacctgtttttgccttacttattctctgaacactgaagtatttcctgtgatgtactggacactgttttccattatgtacctcagttaaaatatgtaaatttacttcttagcaagctgtataatacttttaaaaagctcctttacgagtctaatgagactaatatatttatgcacattttctgaatgcaagcctaggaagggaacaaagtcagcatcaatattccaaccaagcctttcttgctccaataatatgcttttgtttttgtttttgtgtttttgtttttttagacaagagtttcactcttatcacccaggctggagtgcagtggtgcaatctcaactcactgcaacctctgcttcccggttcaagtgattgtcctgcctcagcctcctgagtagttgggattacaggtgcccaccatcacacccggctaatttttgtttcgtatttttagtacagacagggtttcaccatgttggccaggctgatctcaaactcctgacttcaggtgatctggccgcatcggcctcctaaagtgctggaatggattacaggtatgaaccactgttcctggcatatatgcttttgcttctaatttatcaataggcctcttatgccagcactacagagtaaaaagcaacatgcaaaagtcagctttttgtctgtacacttccacggaacaatccaatcacttcgttgaaggtgtccagcaagctcttgttgagaaaatccctgttgaaacttctcagtgtcaaaagcccaggtatcacaggatagagtagcaatcagcaaccaaaccatgactgtatgtggagatgacatattcagccccagataatgtattcacatgagtgaagggtggagtcattgcctgtcagattctacagtcatttggattagagagggcaatacagagttaggtgctactgaatccaaccactgagtccttctcccttgaaggcaacacccacagtgatagtgtgggccacagagtagaaaccccaccatcaacacgactccaaatgtgattttgcccgggatgcaggtgctgtgttgggatgcaggtgctgtgtggggatgaccagtgaaggtaggggacactggaagcacagggtgagggagatgaacaggacacagctgagcctgattattggccttgactgtgggagtatcttgatgcttcacaaacaccccagagaggacattgtagcacaggcccaaagagtgttcataaaccagagggccaccacttttggaaggcagtgatgtggctttctgtttgagtcctgatgctctgttgacagcatacactgttcttcatctgattagaaaagcaatgccggctgggcgcagtggctcacgcctctaatcccagcactttgggaggctgaggtgggcagatcacctgaggtcaggagtccgagaccagcctgacccgccttggacctattggactgaacaaacgggagcaaacacaggaataaaagacaagagacaaaagagtatatttggaagaaggggttggggggcaccttgcctctagtggacaagggccccgagctttacacagccctctgtatttattagacaaaagagcgagaaaagcggggggtgattgttgggtaattgtcagttggccatttggttcacaccaggcttgtgagactgcatcctttggacaataggcactaattttctcagtagataacttcaaggagcccagtgccagggagtgatgtccctcagcaaaccttttggtggcagggcagtgagtttgcccacatcctgcattcatgataaacagtttgctgtttgatcccatatagactcctgcggaatgctgagttggtcacgtcccacgggccttcggctccctgcatatccccctttttgtttatgtattaattgaaagaatgtaaggccaggctgagcagctctcattgtccgattggcggtccatctgattttacagaaaacatagcattagaactgtgttgtgactctgttaggccttctctctctctttgcacccaggctcagctggctcatggctcgtactggagggaccgggcccatggttggccaccctgggttcctcccgtctcccgttcatggtcgcacacaccttgagggcacccaaacggtgtgcccatctcctgtagaaacacaagcatgctctcttccccatgtcagtaaatccaccggacttttccattgtccttcttccagggatttccataacactttcagataaactttcctcttttcctctaacacttgtcaatgtctttctgctggagtcttaccatccggaccaggagccaaaaaaatttaaagtaaataaaaataataaaaagttctgattgaggtggtaagtggcctcctataccccctttttgttttttcaacatgtgttgtaatgtttgatgtgcctgctctataatgccttgtcctctaggattataaggaatttctattttatgggttatagcccaaagctgtaagaaattttgaaaagcatggccagtataagtgggtccattgttagtttttaattgtttaggtattcccatatgagcaaatgatgacagatgatgtcaccatacatgaccagctgtctcacctgtttggcatgtagcatgcagcatttgagaataagtgaaataaattaagcagttctgggtctagtgtacttttaactgtagcagtttctacgcgactggctacatttacaacataagctgaatcacagacaatgttgataggatctgaagctgtgagctgtaaaacctgaatgactgcagttagctctgaatgttgagctgaaaccccagaggtcgttattgttttgggacctttttggaatcacaaatactggagaattccaggggctaactgacttttctttttttttttgagacagtctcgctctgtcgcccacgctggagtaaagctctgtctcccgggttcatgccattctcctgcctcagcctcccaagtagctgggactacaggcgcctgcaaccatgcccagctattttttttgtatttttagtggagacggggtttcactgtgttagccaggatggtctcgatctcctgacctcgtgatcctcccgcttgggcctcccaaagtgctgggattacaggcgtgagccaccgcgcccggcctgctaactgacttttctatatgtcctgtgttcaattgctcttttaccaacagatgaagttcatctagcttcttttgtgataggggccattgatccacccacacaggtttgtcactgagccattctaatggtaaggcagtgggcaaaggagaaatatcaaatatcaatgacccccccgtcagaaatccttgtgtcctagcccttttctatctgtttttccagttactgatatcgggttaggatttcattgtagaaatttccctaaacctttttcactctgatatcccatgttcttcaacattttaaatcctggattatcaaagttttcatttgtaagtctcctatcccatgctgtaagtctcgaccccataaattgatggctatatttgcaacataaggctgcaaagtccagagcaagcttaaagttgtaaaagttctttaataaataaacagagtaacctgataggacgggcgcggtggcccacgcctgtaatcccagcactttgggaggccgaggcgagcggatcacgaggtcaggagatccagaccatcctggctaacacagcgaaaccccgtctctactaaaaatacaaaaaattagccgggcgcggtggcaggtgcctgtagtcccagctactcgggaggctgaggcaggagaatggcgtgaacccgggaggcggagcttgcagtgagtggagatcgcaccactgcactccagactgagcgacagagcgagcctccgtctcaaaaataaataaataaataaataaacagagtaaccttagctctctgagtgctagtaaactcagatcgagtgattgaattatgtggtctctactagcctgctgcttttccatgtttaccagacccatcagtaaaccgtgttaaagccttaggtatgggggagtgaaataccgcttcgaattgccttttacttaaacgaatcctgatgatatgagggtcataacttagcatttggactgcattaatcattaagattgctagctgaaatagtaataagtttaaaaagaaaatctgaacgcgtctctagaagcagagacttaaatgatatactttaaccatgtgcttaaaaccacgggcggaatagcttaaatcttgtaattgagtttttgggctgaccaagtttatggactttaatctggcaaacagtcttgaaaacagtgactcactggctggggaactcaatttaggactcttttagcaagtacaaatcacactatctgtaatcagtgggtaagacagtcattcatgcataagttttcactacacttacaacttttcttcactttctgagaaggacacaacatttttaccttctaatttgacaaatatcatttaattaggtttaaagttctcctttaaagggtaatgtgtggttttacatgcctagcttttaattactcattaatgaattcgtgggccctctgtaatctctttcccttcagaggttactgttttacttaaattgaatttggaaagctaccttaggggtaggagagagataacagtggccattattagaaaagaggtttttcaaattcttacattttacttaaatcttagcagagaatcatagtctgggacgtacgtaacacatgaacttttgctatgggctgctcacagagccagagggctgcggtgcaggtccttggcggcggccgcattgtacttgctcaggttttgcctgtgtctgcgccgctccctccctcctttgccgggggtggggcatgctgccagcctgggcggaccttgtgggcttggtcgctgccagcttttctgctgctgaaccttctattccgcccaccgcttgcttggtcgcgcggtttcggcttctaatgccttttttctttctttttttttgagacggagtttttgctcttgttgcccaggctggagtgcaatggcgcgatctcggctcaccgcaacctccgccttccaagttcaagcgattctcctgcctcagcctcccgagtagctgggattacaggcacttgccaccacgcccggctaattttgtatttttagtagagacagggtttctccatgttgctcaggctggtttcgaactcccgacctcaggtgatctgcccacctcaggtgatctgcccgcctcagcctcccaaagtgctgggattacaggcatgagccacctcgcccggcctttcttatctttttacagacatacacctgcttgccttgccgattttgcattactgagcaggttaagagctctccttctaatgctgcctgctcaagacagggactgatagctgtagcgtatcctctgtcctttttcctatctattggaggaggaggcttaggtaagacctctgtttcctctttgttatttttggcccagtgatattggggctgagggaagagaaggtgataaggcaggtgacgttttctcctccttcctctttttaggctcttctgtgtgtaaactgagccaggactgctctaattaaagcccataacgttaaagattttactgggacctgatgcctttgcacctgatgttgttcaagatttctccccactcattcccagagttctaagcctagcgttccttcttccgggaaccatgggcttatgtactccattattgaccacactagtttttaattccttcaacaacttaaattctagtggggtgtgttcatgaataaactgctgtggattatttgaatcgggccttacggaaataggaaaagtgcaaggtcctaagggctctccagctatggcagcagagcataaagttgtttgttttggggtctctatttctgctactgaaggaggcagtacagatgtttctgcgattggaggaggcggtataggccaatttttatcctccctcacctgttttttattttcagttggcgctgtgggtgggacaacagattctttcagatttttagactcagcctgctgtcccgcagaataataaggagctaatggcagaagtacagtatgaactaaactccaagtggagaaaactgaagaatcaactttaaaacctttttgatgagcctgttttaatccttctcctgctctgtcccaattttccgcatcaagagtgcctgcctgtggaaaccatgggtgatgcgtgaataaccatttgtggcttctgcaggaggttagttagtgcctgcgaattaacctgagctccagactgtctcaacagaaacttaagcaagtgcacataatgtttttcttcagtagacaaattcttccccttgttaacctgattcagaaaacttccccttcccagtacttctttaaagcactgcccccagtacttctttagggcactgaccttacatacgctatcggcagactcatcccggagtccccgtgcgtcttgtcaatttcagttcctctactccagcagaccttcttcgttcacgtcctcatagtcccgtgtttggactgccgcctgttcgagtgccacttatagagcttccgatcctgtcgctgtttggggtgccactgtgtaacctgcacggacctagggggactgaacaaaggggggcgaacgtgggaataaaagacaagagacaaaagagtatatttggaagaagggatgggggcagcaccttgcctctagtggacaagggccccgagctttacacagtcctccgtatttattaggccaaagggatagtgagaaaagagggagtgattgtcgggtaattgtcagttggccgtttggttctgtttggttcacagcaggcttgtgagactgcatcctttggacaataggcactaattttctcagtagataacttcaaggagcccggtgccagggagtgatgtccctcagcaaaccttttggtggcagggcagtgtgagtttgcccacaacctgcattcatgataaacagtttgctgtttgatcatatagactcctgcggaatgctgagtttgtcgtgtcccagcggcctttggctccctgcactgaccatcatggagaaaccccgcctctactaaaaatacaaaattagccaggtgtggttgcgcatacctgtaatccccgctacttgggaggctgagacaggagaatcgcttgaactctggaggtggaggttgcggtgagctgtgatcacgccattgcactccagcctgggcaaaagcgaaattctgtctccaaaaaaaaaaaaaaaaaaaaaaaaaaaaaagaaagaaagaaagaaaagaaaagaaaaaagaaaagcaacgctgcagtttgtaagtttcaacaatttagaattaaaagttattttggcaatctaggactcattcttcattctggctgcagacagagctatggatagggaatgtcacacatatttttaaggttatgttgtcttttatgttaaatggataacatttccactttgcgtttccatatgcaatggaaggccaaggcagcagaatcccttgaggccaagacttcaagaccagccgggcaatatagtcagactgtgtctctacaaaatattttttaaattgtttatataatttatgagattccagtgtcatgctgtcagctaatattaggaaattagtaggtgtgactatggtattctggttatgagaaatgcttcaatttattttattttattttttttttgagacggagtttcgctcttgttgcccaggctggagtgcagtggtgtgatctcagctcactgcaacctccgcctcctgggttcaaacgattctcctgccacagcctctcaagtagctgggattacaggcatgcgccaccaggcgcagctaatttttgtagttttagtagagacgggtttcaccgtgttggccaggatgatctccatctcttgacctcgtgatccgctcgcctcagcttcccaaagcgctgggattacaggcatgagccaccgcgcccagccttttttttcttttcttttctttttttttttttttttgagacggagtcttgctctgtcgcccaggctggagtgcagtgacgcgatatccgcttactgcaagctccgcctcccgggttcacgccattctcctgcctcagcatcccgagtagctgggactacaggcgcccgccaccacgcccggctaattttttgtatttttagtagagacggggtttcaccgtgttagccaggatggtctcgatctccagacctcgtgatctgcccccctcggcctcccaaagtgctgggattacttacatgcttgagccaccgcgcccggcttttttttttttaacagtctcgctctgtcacccaggctggagtgcagtggcgtgatttcggctcactgcaacctccgcctaccagattcaagcgattctcgtgcctcagtctcctgagtagctggaattataggcgtgtgccaccactcctgactaatttttgaatttttggtagagatgaggtttcaccatgttggccaggctggtctcaaattccagaccccatgtgatccgcctgctgtggcctcccaaagtgctgggattacaggtatgagccactgtgcccagcctcagaagtgcttccgttcttgagatgtgaaaattgcctttttagatatacgttaaaaaaaaaaaaatagagatggagccttagtatgttgaccaggccggtctggaactcctggcattaagcgatcatcccatctaggccccccatagtgctaggattacaggcatgagtaaccacacctgagatgttttatatttgcagtttttaataaagcaaagtcaaaaagaacaatttttaggataaatgaccttaggttgaaaacatttttattttcaaggaaaaatttgtgaattcattcctgtaccaaaaaattacatccagttcatttactacagcatgaaattttattgaaaagaacttaataatttcaaatgtgagcagaggttattttattctttcctttcacttactgtctgtctccctgagtttctttcttttttttttttttttttttgagacagagtttcactcttgttgcccaggttggagtacaatggcgtgatcttggctgactgcagtctctgcctcctgggttcaagcaattttcctgcctcagcctcccgagtagctgggattacaggcatgcaccaccatgcccggctaattttgtatttttagtagagacggggtttctccatattgaggctggtctcgaactcctgacctcaggtgatcctcccgcctcagcctcccaaagtgctgggattacaggcgtgagccatcacacctggctggatcttttacctaccatataggtaaaaccatggtcaaaagtgatacagaagcaggaggagcaagatggccaaatagaaccctccagtgattgttcccccaacaagaacaccaaattgaacagctatccacacaaaaagtaacttaggctgggcgcagtggctcacaccggtaatcccagcagtttgggaggctgaggcaggcaaatcacgaggtcaggagttcaagaccagcttggccaatatggtgaaacaccgtctctagtaaaaaatacaaaattagctgggcatggtggtgtgcacctgtaatcccagctactcaggaggctgaggcaggaggatcgcttgaacccgggaggtggaggttgcagtgagccgagatcgtgccactgcactccagcctgggtgacagagtgagactctgtatcaaaaaagagaagaagaaggagacggagaaggagaagaagaagaagaagaaaggagaagaaagaggagaagaagaagaagaaccaaacatcagctgtgcaatcacagtgcctggtcttatattaagtaaagaggcacggaagagggtgggaaagcagccttgaattgcctatgccaccactttcccatcctctcgcagaggccaaatggcatagagagtgaatctgtaagcttgggagagggagagcgcagtgattgtggcactttgcattggaactcagtgctgccctgtcattagcagaaagcaatatggggcagaactcagccagtgcccatggagggagcgtttagatcagccttagccagagttgaattgtccatcccaattgccagaacctgagttctggcaagccctgtcaccgtgggctaaaatgttctggtgtcctgaagaaacttgaaaggtagtcaggatcacaaggactgcaattcctgtgtaagtcttggtgttgggtgggcttggacccagcggacttggtgtgcacatgacctagtgagacactagctggggtggcaaagggaatacttgtgccaccactctcctgaccccaggcagtacagccagcagctcagggagagactacttccttctacttgagaagaaaggggagagtaaagaggacttatattgcaacttggatgcaagctcagcaacagtataatagggcaccaggcagaggcgtgaggcctctattccaggccctagctcctggacatttctagatacaccctgggccagaagggaacctactgccttgaaaagaaggacccagtcctggcagaattcatcaccttctgaacccctgggccctgagtgatcagcaggggtagccaggctgtacttgtatgggccttgggtaagacttagagctgtactggcttcaggtgtgacccagcacctttctacctgtggtggctatggggagagattcctgctgctggaggaaaggagagggaagaataggccaggcgcagtagctcatgcctgtaatcccagcactttcagaggctgagcccaggagttcaagacaacatgaaaaaatcccatctctacaaaaaatacaaaagattagccaggtgtggtggtatgcacctgtagtcccagctacttgggaggctgaggtgggagaatcacttgagcccaggaggtcagggatgcagtgagtcaagatggcaccactgcactccagcctgagagacagagcaaacccctgtctcagaaaaaaaaacaaaaaaaaatttctgtacagcaaaagaaacagtcacagtcaacaaagtgaagagacaacccacaaaatgggagaaaacatttgcaaacaatccatctgacaagggattaataaacaatatagagggagctcaaatacctcaataggaaaaaaagtctaataattcaaattaaaaatgggcaaaatatctgaatagacatttctcaaaaaaagacataaaaatgaaaatcagacatatgaaaaggtgctccacatcatcagagaagtgaaaagacaacagcaataccacatcatctcaccgcaattaaaatggcttttatcccaaagagaggtaataacaaatgatggcaaggatgtgaaaaaaagagacccttgtacactgttggtggaaatgtaaaatactaagccactgtggagaacagtttggaggctcctcaaaaatctggaattagaactaccctatgatccagcaatcacattgctaggtgtattccaaaaagaaaggaaatcagcatatcgaagagctttctgcactctgatgtttattgcagcactattcacaatagccaagattcagaagcagcctaaatgttcatcaaaagatgaatcgataaagaaaatgtgatacatattggctgggtacggtggcttacacctgtaatcccagcactttgggaggccgaggcaggcggatcacgaggtcaggagatcgagaccatcctggctaacatggtgaaaccccgtctctactgaacatacaaaaaaaattagccgggcgtggtggagggcacctgcagtcccagctactcaggaggctgaggcaggagaatggcgtgaacccaggagccggagcttgcagtaagccgagatcgcaccactgcactccagcctgggtgacagagtgagactccatctcaaaatagaaaagaaaagaaatgaaaagaaaatgtggtacatatacatagtggagtactattcagccatgaaaaagactgagatcctgtcatgtgcgacatcatggatggaactggaagtcattatgttaagtgaaataaaccaggcacggaaaggcaaacttcacatgctctcactaatttctgggagctaaaaataaaacaattgaactcatggagataaagagcagaagaatggttaccagaggctaggaagggtagtggaggaggcaggaaaataggggtggttaatgggtagaaaattatacttagaatgaataaaatctagtatttgatagcacacagggtgactacagtcaacaataatttattttacatttaaaaataaaagagtataattggattgtttgtaacacaaggaaacaataaatgcttgaggtgatgaatacctgatttatcctgatgtgatttgatatggcttggctgtgtccccacccaaatctcaacttgaattctgtcttccagaattcccaggtgttatgggagggacccagggggaggtaattgaatcatgggggctggtctttcccatgctattctcacaatagtgactaagtctcacaagatctgatggatttatctggggtttccgcttttgtttcctcctcattttctcttgccaccaccatgtaagaagtgccttttgcctcccaccatgattctgaggcctccccagccatgtggaactgtaagcccaattacacttctttttctttccagttttgggtatgtctttattagtagcttgcaaatggactaatacagtaaattggtaccagcagtgggttgttgctgaaaagatatccaaaaatgtggaagtgactttggaactgggtaacaggcagaggttggaacagtttggaaagctcagaagacagaagatgtgggaaagtttggaacctcctacagatgtgttgaatggctttgacaaaaatactgatagtgatatgaacaagaagatccaggctgaggtggtctcagatggagatgaggaacttgttgggaactggagcaaaggtgactcttattatgttttagcagagactggtggcattttgcccctgccctagagatttgtggaactttgaacttgagagagatgatttagggtatctggaggaagaaatttctaagcagaaaagcattcaagaggtgactaggtgacctgggtgctgttaaaagcgttcgttttaaaagggaaacagaacataaaactctggaaagtttgcagcctgatgatgcggtagaaaagaaaaacccatttttaaaggagaaattcaagctggctgcagaaatttgcctaagtagcaaggagccaaatgttaatccccaagaccatggggaaaatgtctccaggccacatcagacacgtttacacagcccttcccatcacaggcccggaggcccaggaggaaaaagtggtttcacgggccaggcccagggtccccgtgctgtgtgcaatgtagggacttggtgccctgtgtcccagccactccagccgtgactgaaaggggcgaacgtacagcttgggctgtggcttcaaagggttgaagccccaagccttggcagcttccgcatggtgttgagcctgcaggtacaaagaagtcatgaactgaggtttgggaacctccacctagatttcagaagatgtatggaaacacttggatgtccaggcaaaagtttactgcagaggtggggtgctcatggagaacctctgctagggcagtgcagaagggaaatgtggggtcagagccccccctacagagtctttactgggggcactgcctagtggagctgtgagaagagggctaccatcctccagaccccagaatggtcgatccactgacagcttgcactgtgcacctggaaaagctgcagacactcaacaccagcccgtgaaagcagctgggagggaggctgtacctgcaaagccacaggggcagagctgcccaagaccatgggaacccacctcttgcatcagtgtgacctggatgtgagacctggagtcaaaggagatcattttggagctttaaaatttgagtgccctgctggatttcagacttgcatgggccctgtaactcctttgttttggccaatttctcccctttggaatggctgtatttacccaatacctgtacccccattgtatctaggaagcaactagcttgcctttgattttacaggctcataggcgggagggacttgccttgtctcagatgagactttggactgtggactttgggattaatgctgaaatgtgttaagactttggggtactgttgggaaagcatgattgattttgaaatgtgaggacatgagatttggaggggtcaggggtagaatgatatggtttggctgtgtccacacccagatctcagcttgaattatatctcccagaattcccacatgttgtgggaggaatccagaggtagtaattgaatcatgggggatggtctttcccctgctgttctcatagtagtgagatgggtttatcagggatttctgcttttcctttttcctcattttctcttgccgctgccatgtaagaagtgtcttttgcctcccgccatgattctgaggcctccccagccatgtgaaactgtaagtccaattaaatatctttttctttttttcttttcttttcttttctttctttttttttttttttgagatgcagtcttgctctgtcacccaggctggagtgcagtggcatgatgtcagctcactgcaacctccgcctcccgggttcaagcaattcttctgcctcagcctcctgagtagctgggactataggcttgcaccaccatgcctggctaatttttgtatttttagtagagacggggtttcaccatcttggccaggctggtctcgaactcctgacctcatgatctgcccacctcagcctcccaaagcgttgggattacagacgtgagccaccgtgcccgaccaacatctttttcttcccagcctcaggtatgtctttatcagcagtgtgaaaacggactaatacatggttattacacattgtatgcctgtattaaaatatctcttgtacccaataaatatatacacctactatgtacccccccacacacaaaagatagcgttctttgtgtttttaaataggttttgccttaaagtctagtcaagtatgataatggcatatccactcttgttctcttttggttactatttgcgtggaatacctttttacctctgtattaggcttttcttgctttgccataaaaatacctgaggctggataattgataaagaaatgttttatcaactcatgtttctgcaagctttataggaagcatggtgctggcatctgctcaggttctggggaggcctcagagtttttacttttggtggagggtgaagccggagcaggcctctcacgtggcaaaataggaacgagagagagaggtagaggggaggtgccacacactttcaaaccaccagaccttgtgcgaactcagaagaagagctcacctatcactaaggggatggcccaagccattcattagagatctgtccccatgatccaaacacctcccaccaggccctgcttccaaccttggggattgcaattcaatgtgagattttgcggggatgtacatttaaagtatatcatcttccattccatttcgagtattttttgtcttggggtataaaatgagtgtcttggtcatgcattatggctcatgcctgtaatcccagcatttttatttttttaagacggagtctcggccgggcgtggtggctcaagcctgtaatcccagcactttgggaggccgaggcgggcggatcatgaggtcagaagttcaaggccggcctgaccaacatagtgaaaccctgtctctactaaaaatacaaaaaattagccgggtgtggtggtgtgcacctgtaatcccagctactcaggaggctgaggcaggagaatcgtgtgaacccgggatgcagaagttgcagtgagccgagattgtgacattgcactccagcctgggcgacagtgggagacactgtctcaaaaaaaaaaaaaaaaaaagatggagtctcactctcgccaggctggagtgcagtggcgtgatcttggctcacagcaacatccgcctcccaggttcaagtgattctcctgcctcagcctcctgagtagctgggattacaggctcgcgccaccacacccagctaatttttgtatttttagtagagatagggtttcaccatgttggtcaagatggcctcgatctcttgacctcgtgatccacacgcctcagcctcccaaagtgctgggattacaggcgtgagccaccgtgcccggccattcctagcatttctggagactgaggtgggaagactgctggaggccaagacttcaagttcagcgtgggcaacatggtgagatcttgtgttgagaagaaattttttaaaatttacacaattaatgacattttaatgtcattctatcaatcaatattaggtaagtattaggtgtgactgatattctggatatgtataaaattaactcaatatttgagatatgaaagctgccagggccaggcgtggtggctcacacctgcaatcccagcactttgggaggctgaggcaggcggatcacctgaggttaggagtttgagaccagcctggccaacatggtgaaatcccatctctactaaagatacaaaaaattagcccagcatggtagcatgcacctgtaatcccagctactggggaggctgaggcaggagaatcgcttgaacccaggaggtggaggttgcagtgagctgatatcgtgccactgcactccagcctgggcaacagagtgagactctgtctcaaaaaaaagaaaagaaaactgccttttatttttaattttttgtatttttatttttgagacagaatctcactctgtcacccaggctggaatgcagtggctcaatcactcatcactgcaaccccaactgattctgggctcaagtgattctcctgcctcaaccaccctagtagctgggactataggcacatgccactacgcctggctattatttaacttaattttttttggggggggatggagtcttgctctgtcacctaggctggagtgcagaggcgtgaacttggctcactgcaacctctgcctcctgggttcaagcaattctcctgcctcagcctcccaagtagctggaataacaggtggccaccaccatgcctggctaatttttgttttgtatttttagtagagatggagtttcaccatgttggccagactggtctcaaactcctgacttcaggtatccacccacctcaaccgcccaaagtgctgggattacaggcatgtgtcaccgcacctggccccgccaatgtttttaacttaaattttcatactcatgcacgtaactccacattctcctctattcacaggccctgataatctctattctactttatccctttatgaatttgactattctaggcacctcatataagtgaaagtatacaatatttattctggtgtctctggcttatttcacttagcataatgttttcaagttgcatgcatgtgttaacgtgtcagtaattcattgcttttttgtgcctgaaaatattctattgtagggataaatcaccctttgctcatccatttgtttgttgataaacatgtgggttttttccacagtaatattctgaataaggctgctatgaaattggtgtacatgtgtctctgtgtgttgtgcttttgattttttaggatatatacctaggagttgaatagtcacaggggaattctaaattcacctttttaaggaacagccatactgttttacacagtggctgcaatgttttacattctctacatcagtgcacaaggattcccgtttctccatgtcctcatccacacttattataatttttttttttttttttgagacggagtctcactctgtcgcccaggctggagtgcagtggcacaatcacagctcactgcagccttgacttccctggctcaagtgatcctcccacttgaggatcactgggaccataggtgctaagatgggactaccggtctgacccctgctttccatcgtggcctgaactagatttctagattttcaggtttactttgggatgcccttagccgagaggggaatccttcagtttgggagagaggggtgggctttgaattttatttttggtttacacatagaatagctggagtcggagtgtgatttgatatatgtagaaaatctgttaaggtcaagacccattggattaccttatggagaaaaggtttatgaatttgacaatttatgtcagtcagtaccttaaactgactccaggtgagtttcctgctggtgaaaatgaaggtctggggctgggcgcggtgtccttgtctctacaaaaataccaacattagccaggcatgatggcgggtgtctgtaatcccagctactctggaggctgaggcgggagaatcccttgaactcggaaggcggaggttgcagtgagcggagatcgcgctatcgcaccccagcctgggcgacagagcgagactctgtctcaaaaaaaaaaaaaaaaaaaaaaaaagagagaatatgatgaaggtctggaaggagagagtgttgccacactatgcagacaggacaggaaggcatgttgagagcctagagttaaatccttcagtgttcaggcctcatcaccaggttctgatcggttctggggctctgtttcagcagtcagaacctggctcccaagaatctgtttaacctcctgaatagggggtttcctgctgaacagtggctgaaaaactgcttctctgagctagttcatgtttttgcttttcttctcttttgattccttcatagaatattgctgccatataattccagtttttccacacatttaacaattttattccattgttgctgtgtttttattttcttggtgaaaacgagtagactccagggcgcggtagctcacgcctgtaatcccagcactttgggaggccgaggggggcggatcacgagtcaggagattgagaccatcctggccaacatggtgaaaccccgcctctactaaaaatacaaaaattagctgggggtggtggcgcgtgcctgtaatcccagctactcaggaggctgaggcacgagaatcgcttgaacccagaaggcggaggttgcagggagccgagatcgcgccactgcacttcagcctggcgacagagcgagactccgtcaaaaaataaaataaaaaataaaaaaataagactgagagatcaggtgggagaaaggcttggtcatgcagccagcagcttcatcccaaattcctgatccctggaggacatcagaccccctctcctactgcagtgtggcctgtgtggcctcggctccccttctgctccgaggccaggggatgtctccactggacagtgagtctgggattccctgcacacagttgtgaccccccagtcccggaggaagaagcaggaagggctcgcagactattggcaggaattcttcttaaatgcagatattccccgggaggggtcaggtcactgcccagggaggaaccccccctcccccgcccgccccatgccaagagctgtgtctgcaacctgttcatctggctccactcagcactgggagatcacttcttctgtcgctcagtgcctagggggcgggacctggagtactatccaatcagagccgctgggcggggccgtgagaactgtcaatcaggcgtccaggaggctggaggatgcgaggttgaaaaagcccgcggcgtcttctctgtcacccgcgctcggctccctgctcggtcgggctggaacctgtactggcagccggaggtgtaggtaggaaccggaatacctcggaagccgggaaatggtgagtgtccgaggccggggttcccgagacagggtacagctggttgtaaccgaccggaaccggctgtggcgggacccagacctcctcgctgttgtctctggggtctgaggacccgagtgccctggcccagctcggtcctcggtcctctcggcctcagggtggggctgggcctgcagccaggactccgggcgtcctgtccggtccccgcgcggcaactgcggcccaggttccggagtcctctctgggcagctccgcgtccgcagccccgcgtctccctagattgtgcggggacacgggagggtcatggggggaatcctcctcgggtgtggggttcatgtggaaggagcagcggtctgtggggtccccagttcctcctttgtctccaaggggctcgagtttttactgagatatccagatatatgcgaagcagggtctcaaatccgcaactgtgatccctggcctagcttctcctagggctgccagcaaatccctggatttccagatcccgctccgcgttttagagctggcctcctcttcagttcaccacaacaatgtcaactcttcgtcccccaggctttgtttcaaacatagccatatatatgtgtgtgtgtgtgtatatatatatatgtgtatatatatatatatgtgtatatatgtatatatgtgtgtgtatatatatatatatatatatatatatattttttttttttttttttttttttttttttttttgtgacagagtctcgctgtgtcgcccaggctggagtgcagtggcgcaatctcggctcactgaaacctccgcttcctgggttcaagcgattctcctgtctcagactcccgagtagctgggattacaggcgcccgccaccacgcgcggctaattcatgtatttttagtagagacgggttttcaccgtgttggccaggctggtctcaaactcctgacctcaggtgatccaccctcctcagccacccaaagtgctgggattacaggcatgagccactgcaaccgtcctcacacgtttttcatgtatatatgaattatatatatattaaatatatatatataatttttttttttttggtggagacggagcctcactctgttgcccaggctggagtgcagtggcacgatcttggctcactgcaacctctacctcgcgggtctcctgcctcagcctcccgagtagccgggactgcaggcgcgtgccaccatgcccggctaatttttgtattttagtagaaacggggtttcaccatgttggccaggctggtcttgaactcctgacctcaggtgatccgcccgtctaggcctcccaaagtgctgggattataggtgtgagccatggcgcctggccacacgcaatattttaataggcttttttttttttaagagggcaaaatatggctctttttgtaaagatttgttgtgtgtttgtgaacatttcacacttgaggaagcggagaaaaagcacctgacacttgctgtaaacaatctttatgcctctcctccttttatctgcccgaggcacggacaccttctgagaatgtctttgggttgaggtttatctttggaaactttacagggcgatgtgtcctcaactcaccctccatcttatcctggtcctgggtttcagaactgcctggggctgactgaagatgcccacagctaccatgtttcttggagggtgggtcactcctcccagaggacaacctgaggcgtggagttggggcttcccaggagaggagctaggtgccctggggtgggagaagtcccctggtattcccctccttaaaaagctaatcctgggccaggaacagtctctcacacctgtaatcccaccattttgggaagcctgtaatcccaccactttgggaagccgaggcgggtggaccccttgagtccaggagttcgagaccagcctaggcaacatggcgaaaccccgtctctactaaaaatacaaaaaaactagccgggtatggtggtgcgtgcctctagtcccagctcctggggaggctgaggtgggaggatcacctgagccagggaggtcaaagctgcagtcagctgcgatcgcaccactgcactccagcctgggcaactggagtgagacccagtctcaaaaaaaagctctaatcccctgggacactcagcttttcttccccaaatccagattccattccttggggacacttggctcatcagccagttggatggtggtattgaagggacaggacagaaatgattcctgttttctggatgctctcagcatagttaagggagaaaactattcctaaggacaggaaaacccaccccactgagatggtgcaagaacctgaaaagcaaaatgcactttaggaacacaggggacgcacaatgtgtcgtctcctgggagggtggtcactgagcacttcagtgagcaggatggggatgggggatgcccctggtgacaggaggatacgatgtgacacttgagttagacttgtctgtgttctaggtccttactgtctctctctgggcttgtcaccttgcaaagattggttcacctatttcagctgcagattaaatctctacttttggaagcttttcaactatcttttggttatcaatttctagtttaatatgatttgattgcatactttatagcatttctgttcaatttgttaaggcatattttatgcttccagtgtagtttactgtggtgaatatttcatgtgaacttgagaggaatgtgtattctgctggtgttgaatgaaggattctataaatacatattaattaaatgcagttgattaattgatacagtttggctgtgtccccacccaaatctcatgttgaattgtagttcccataatcctcacctgttgtggaagggacctggtggagataattgaatcatgggggtgtttttccccatcctgttctggtgatagtgagttagttctcaagagatctgatggttttataaggggcttccttcttcgctgggcactcgttcttctccttcctgccaccatgtgaagaaggacgtgtttgctttcccttccgccatgattgtaagtttcctgaagcatgtctttattagctgaatgagaacggactaatacattattgatgctgttgagtttagctatatcattagtgatttttttgttgtattgacctattaattatggatagaggtgaactgttggcttccaactataattttggatttgtatattttgtcttatagttttatgtttttgtcttgtatcttgatgttatattttatgggcatacatataagtaataaagattattataccttatgtcttttttttttgagacagggtccccatctgtctcccaggctggagtgcagtggcacaatcacagctcactgcagctttgacctcccagtgcccaggctcaagtgatccttcagcctcagcctcctgagtagctggtactacaggcatgtaccacgatgcctagctaatttttgtttttttttgttttttttttgtagagacaaggcttcgccatgttgcccaggctggcctcgagctcctggactcaagcattctgctcaccttggcctcccaaagtgctgggattacaggtgtgagtcattgcgcctggtcctattatgtcttcttgcaggattgacctcttcactgttacaaaatctcttttacaaggcaatgatggtccggcgtggtggctcacacctgaaatcccagcactttgggaggccaaggcaggtggatcacctgaggtcaggagttcgagaccagcctggccaacacggcgaaaccctgtctctactaaaaatacagaaaatagccgggtgtggtggcagtcacctgtaatcccagctactcgggaggctcaggcaggagaatcacttgaacctgggaggtggaggttgcagtgagccgagattgcaccattgcactccagcctgggcaacagaatgagactctgtctcaaaaaaaaaaaaaaaaagcaagcccaaggcaattatgaggaaaattccttgccattttccttgatctaaaatgtggtttgtctgagttttataaaactattgcacatttcttttgattagtgttagaatggcttatctttcttcatacctttttatttaatctattcacttctttttgtttgaaatgattttcttgtacacattactgaggcttgtttaatctactatgtcaatctgtgtctcttttttgtgtatataagtaacagacatttaaagtggtaattgatataattgtattaatatgtatatatgtaattgttctctgtttgttgtacttgttttcttctttctttctttcttttttttttttagacggagtttcattcttgttgcccaggctggagtgcaatggcgcgatctcagctcaccacaacctctgcctcccacattcaagcgattctcctgcctcagcctcccgagtagctgggattacaggcatgtgccaccatgcccagctaattttgtattttttagtagagacggggtttctccatgttggtcaggctggtcacaaactcccgaccttaggtgatctgtccacctcgaccttccaaagtgctgggattacaggcatgagacactgctcccggcctcgttttctatttttaaaactttctctttttctaccttctgtagtttttgcttgtttgtttgtttttttgagatggagtctcgctctgttgcccagcctggagtgtagtggcgtgatctcatctcactgcaaccttcacctcctcctgggttcaaatgattctcgtgcctcagtctcccgagtagctggtattacaggcgtgcgccaccatgcccggctaattttaataattttagtagagacagggtttcgccatgttggccacgctggtcttgaactcttgacctcaagtgatccatctgcctcggcctcccaaagtgctggcattacaggggtgagccactgtgcctggtagtaactttttcaaagtatgtttacagagatgtattccctgtcctctctagtcaatgaaggctctgttcctttaacttgtgttcatctagtgttttgagagaggtttcctgaatgctaggagctaaaataaaacagacctggccgggtgctgtggctcatgcctgtaatcccggcactttgggaggccaaggcgggtggatcacctgaggtcaggagttcgaggccagcctggccaacatggcgaaaccctgtctctactaaaaatacaaaaattagccaggcgtggtggtgggcccctgtaatcccagctactggggaggctgaggctggagaatcacttgaacctgggaggcagaggttgcagtgagctgagatcttaccactgcactccagcctgggcagcaagagcagaactctgtctcaaaaaacaaacaaacaaacaaacaatcaaacaaaaagaggcccaaacctgacttcttccaggctttgtggatggctttgtcgtgcagcattccttgaacactcggcctgagttttgtttgttttttttttttttttgagacggagtctcgctctgtcacccaagctggagtgcagtggcgtggtcctggctcactgccagctctgcctcccgggttcacaccattctcctgcatcagcctcctgagtagctgggcctacaggtgcccgccaccacacccggctaagttttgtagttttagtagagacagggtttcaccgtgttagccaggatggtctggatctcctgacctcttgatctgcccgcctcagcctcccaaagtgctgggattacaggcgtgagccaccgcgcccggccgactgtttaaaactctgcgttagcctccaatttctgctgaactgagcctagagatcagccagtgccgaaacttagggcctcctcaggttttttctagaaatgtgttatttcctgggcagacgtgaggctttctcaattccccaggataccaaagtgcttttgattagcctaatttctgaagctaattttctctccagattgttttcctgggtcttagatggtctattctgtctcagtcatagactgttgttccagatggttgcaggctttttgttgacaatatttttatgtagtccctgccaatttttgaccccagttaggctttagtgtagttgaaacagagaagagagccttatttcagacttttcgtaggcccaggagaaattggagtatatgaagataatatttgcaaataaatataatatttgcaaataagatggtagaataggtcaccgcacctggcctgttctacattttcacttacctttttctctttgttcatctttctgtcaacagtgtggtgtgttgaatattatagtttcaaaatccttcatgtgtgttaggtaagctgtcactttctggtttagaagatttttagcatttttagacatttgttacctccattagttttgtttaagtagcttttattgactactaacaggtctgttttaatgatttaaggaatttcataaatattcatgagagatgacaccttggtgacatgcagttcttttttttttttttttttttttgagatggagtcttactcttgtcgcccaggttggagtgcaatggcgcagtcccagctcactgcaacctccacttcccgggttcaaacgattctcctgcctcagcctcccgagtagctgggattataggcacctgccaccacgcccggctaatttttgtatttttagtagagatgggttttcaccatgttggccaggctggtctcgaactcctggctttgtgatctgcccacctcggcctcctgaagtgctgggattgcaggtgtgagcccctgcgcctggctgacaagcggttctttagaagaacgtgtacaatctttatccatctttcattctcctttgatgttacctagtatttaaaaattttcctttaggatgatgaaatacatttcattaaccttacgttacacttcattaaatttagtttacggaaaaccggttgccagcttccaggtgttctcttattgtaatcacatagaatgggctaaatcccccaagtaacaagtgttgacagaacatatgaaatgttacgtaccaaggtcactcagacacttagtacccagagtttttttttcatggccatcttagtctgttttatgttcattagaatagaatgcctgaaattgggtaatatacaagaaatgatatttgttttgtacaattctggagtttgggaagtctaagggcacggtggcacatctggtgaaagccttgctggtggggactcttcactatctgaggcaatggaagaagggtattcctaggggagggggtgctagcttaggggtctcttcctcttcttctgaggccaccagtcttactcccaggatatctcatttactcattaaccctttcatccatcagtgaatgaacccattcatgaggcagagccctcatgacatagtcacctcttcaaggccccacttttgaatactgacaccttggggataaagtttcagtatgagttttggaggggacaaacattcaaacctagcagtgactgatcaggtatgcttctctgctgattatatcacaaaatttcaaactctcagaaggatgatggaaattaagcaaataccatattatttacttatttatttatttttcaatttaatttgagacagggcctcgctctgtcacccaggccggaggtcagtgtcacactcatggctcactgcagcctctacctcctgggttcaagcaatcctcccagctcaacctccctagtagctgggactacagacatgcgccattatgcctggctaatttttgtatgttttgtagagatggggtttcaccatgttgcccaggcttgtcctgaactcctgagctcaagcaatccactcgtctcagcctcctaaagtgctggcattacaggtgtgagccactatgcccagtggcaaatatcatattgttttaataaatagttgaggcacacagctccttttctttgttatgctggtgcagctctccttaaatctagctctgagataccatcatagttcaactttctaaataaacgtgtgtagggatatgttgtcttagagctgctaatattgtctcttgtagacaacacatagtaggactttgtcacgagagttagtatagacccactagacagaaagacactagaggtgatctgggcagcatatctcaactccctgaaatcatgaatgagaggcttgtccgtattggctattactttactgaatgtgttcaattctagcatcagaattgctgtgctggagaaaatgagtatagacagaggataagagtctgatgaccaaatcattgaataaatgtttggagtctatagcattgtgtgaacttcctctagagtgtagcttcctagtgctgtcagcctgaaccttcctcctctgccatgtgggatgtttcaggactcaatgatctttgaggatgtggctgtgaactttacccaggaggagtgggctttgctggatccgtcccagaagaaactctacagagatgtgatgtgggaaatcatcaggaacctgatgtctgtaggtaaggatgacatcatttcttcacttagtcaattacagaacaagtgtttcttggtcatctacactgctcaatgatttgaaacatggtagggaatacagtagactggcctgatgcagtggctcacggctgcaatcttagcactttgggaggccaaggtgggtggatcacttgaggtcatgagttcgagaccagcctggccaacatgatgataccccgtctctactaaaaatacaaaaattagccacgcgtggtagtgcacgcctgtagtcccagctactcaggaggctgaggtggaagaattgcttgaacttgggaggcagaggttgcagtgagccaagattgtgccactgcactcaagccttggccacagagcaagactccatctgaaaaaaaaaggaataccgtaaggccgggcatggtggctcacacctataatcccagcactttgggaggccgaggtgggtagatcatgaggtcaggagattgagaccatcctggctaacatggtgaaaccccatctctactaaaaatacaaaaaaaaattagccgggtgtggtggcgggcacctgtagtcccagctactcgggaggctgaggcaggagaatggcgtgaacccaggaggctgagcttgcagtgagccgagatagcgccactgcactctggcctgggtgaaagagcgagactccgtctcaaaaaaaaaaaaaaaaaaaaaaaagaatacagtagacccttgaacaaagtgggtgtcagagactcttaacctctgcacagttgatgatctggttttaacttttgactctataaaatgttaactgttggccgggtgcaggggctcacacctgtaatcccagcactttgggaggccgaggtgggtggatcccttgaggttaggagtttgagaccagcctggccaatgtgaaaccccatctctactaaaaatacaaaaaattaaccaagcatggtgccaggcacctgtaatcctggctactcaggaggctgagacaggagaactgcttcaacctgggaggtggaggttgcagcgagctgagatcatgccactgcactccagtctgggcaacgagagtgaaacttcgtctcaaataaaaagaaaaaaagctaaatgttaatagcctattgttgactggaagctttatcagtaacataaccagtcaattaatacatattttgtgtgttggtgtgtatgtgtaagtgtatattaggacagtgtctcactttgttactcaggctggagtgtaggggcatggtcatagcttaatacaacttagaactcctggggtcaagcaatcctcctgcctcagactcttgagtagctaggattgtaggcaagtgccaccatgctgggctgatttttaaattattttttgtggagatggaggtcttgctatgttgcccaggctggtctcaaactcttagcctcaagcagtcctcccacctcatccctaagtgctgggattataggtataaaccaccatgcctggtctgtttggtctattatatatggtattcttataataaagtaagctagaaaaaagaaatattatcaagaaaatcataaggaagtgaaaacatattgacttgattaagtggatcatcctaaaggaatccttttcattgttttcacattgagtagcctgaagaggaggggttggtcttgttccctcagaggcagcagaggttgataaaagtttgcatatgagtggacttgtgccatgcaagcccattttgttcaagggtcaataatattttggtgaataagtcaggcatggtcacagtgtcccatgaacatagaatctaaaatgtttctataattttgtaatcatttatcatgacttttatgggtctacattttaggaataaaatgggaagaccggaacattgaagatcagtacaaaaattccaggagaaatccaaggtaatttgcacttataacatgaagctgtgtcccttgagataatgttagagtgataggaaattatatttatttacttatgtattcatgtatctgagacaaggcttaatctgtcacataggctagagtgcagtggcatgatcatagcttactgcagccttgaacccctggactcaagccatcctcctttcttggcttcccagaatgctaggattacaggcatgagccactgtgcccagtggaaatttaaagaacaagcaaacaaagtgaagcagcccagcttcaaatttgttaatttttagaatgttttctccaaaaatatatacttaaatacatacacattcattgtttgcaaaatagttgccttggaaacagtattaagaaatcccatagtggccgggtgcggtggctcacgcctttaatcccagcactttgggaggctgaggagggcggatcacgaggtcaggagatcgagaccatcctggctaacatggtgaaaccccatctctactaaaaatacaaaaaaattagctaggcatggtggtgggcgcctgtagtcccagctgcttgggaggctgaggcaggagaatggcgtgaacccaggaggtggagcttgcagtgagccgagatggtgccactgcactccagcctgagtgacagagtgaaactccgtctcaaaaataaaataaaataaaaaaataaagaaaccccatagtggccagatgtggtggttgatgcttgtaatcccagtactttgggagtctgaatgggaagattgcttgagcccaggagtttgagaccagcctgggcaatgcagtgagaactcatctctacaagaaataaaaaaaatcagccaagcctggtggcgcatgcctgtaggcccagctacttgggaggctgaggtgggaggactgtctgagcctggaaggtggaggctgcagcgagctgtggtcataccactgcattccagcctgcgcaacagagtgagaccctgtttcaggaaaaaaaaaaaaaaaaaaagaataagaaaaaagaaactgcctagtaacatcactgttttgataatagctgtaatagagcccctttgcagagaattcagtccactcactgtcagacacttcagacagaacataaagcctacatttctcatgataatgtaaaatatgcaaatcaaatgcttgctaatataaaattatttatcaacaaattctttgtaatgtgcttcttattttttatagaaatcatatggcagagagactctgtgaatgtaaagatggtcaatgtggagaaactttcagcctgattccagatggtataatgaacaagaacactcttcctggggtaaaaccatgtgaaagcagtgtgtgtggagaaggcaacgtggatcattcatctctgaattgctacatcagagctgacactggacacaaaccgtatgagtgtcaggaacatggagagaagccacataaatgtaagcagtgtgtaaaaaccttcagctgcctccactccttccaaacacatgaaaagcctcacacaggagagaaaccctatgattgtaaggaatgggaaaaaaccttcgattctccccaaaccgttcgaagatacagggtagtgcacagtggagatggaccttataaatgtaagttttgtgggaaagcctttgataatctcagtttatatctcacacatgaaagatctcatactggacagaagccatatgaatgtaatgaatgtgggaaagcctttggttttcccagctcctttcatagacatgaaagaatgcacaccggggagaaaccatatgaatgtaagcaatgtgggaaaacctttagttgttccagttccattaaaaaacatgaaagaatccacactggagagaagccctatgaatgcaagcaatgtgggaaagccttcgcttcttccaattcctttcagtatcatgaaaggactcacactggagagaaaccctatgaatgtaagcaatgtgggaaagcctttaattgttccagttcccttagaaaacatgcaagaattcacactggagagaaaccctatatatgtaaacaatgtggtaaagcttttagatttcccagttctattaaaaatcatgaaaagactcacactggagagaagccctatgaatgtcaggaatgtgggaaagccttcagatattccagttcacttcgagtacataaaagaattcacactggagagaagccgtatgaatgtgaggactgtgggaaagccttcagtcatcccacgacctttcatagacataaaattacccacactgcagagaaaccttatgaatgtcaggaatgtggggaagccttccgttatcctgttgcttttcgtagacataaaattacccacactgcagagaaactttgagtgtaaggaatgtgggaaagccttctgttatcacagttcccttcaaagacatgaaaggactcacaacggagaaaagttgtgtggatataaaaaatgtaaagccggctgggtgcggtggctgacgcctgtaatcccagcactttgggaggccaaggcgggcggatcatgaggtcaagagattgagaccatcatggccaacatggtaaaaccccatctctactaaaaatacaaaaattagctgggcgtggtggcatgtgcctgtagtaccagctacttgggaggctgaggcaggagaattgcttgaacctgggaggtggaggttgcagtgaaccgagattgtgccactgtactccagccaggtgacagagtgagactccgtctcaaaaaaaaaaaaaaaaaaagtaaagccttccactattccagtaccttctgaaaccatgaaagaactgacacttgagaaaaacaatgatgttaggaacatgggaaacctttcctttctctctcaatcgtttgaaggcatatggtgtgacatgctggcgatagacctcataactgtaaggaacatggaaaacgattcttgttttccatgctccttgtttattttagatacatgaaagaatttactctggagagaaactatgagtgtaaaaaatgtggtaacgccttgtgtagtttctgtttctctgaaatactgtcatgtcctggtattctcaggggattagttgcaggcaccccgctccccacttcagaacatctaaatctgaagatgctcaagtgctttatataaaatggtgtattttcctagaacctaagcacatcctcttgtacactttaaatcatctctaggttatccatactgcctaatgcattgtaaacgatataaaaatagttgtttcattgtgttatttagggaatgctgacaagaaaaaacatctgtagatgtttaatacagataaccatcacatgcccacctccatagtacaggcccacctcatagtatatgtcagctacaatgaaacattttcttttttttttaaaaaacgttttggattggtttcatttaatggcctcaaaaacacgtgttaacattctccaaatccttggttcttctctcctgataaccctcatgtgatgattgctctgtggttcctaaagctgcagtgtgttgaggtgcttagatatgtggcagtgtagataagtcaggggacatcagtttaacttgaattttctttttttttttttttgagatggagtcttgctctgtcacccaggctggagtgcaatggtgtgatctcggctcactgcaacctccacctcctgggctcaagtgattctcctgcctcagcctcccaaccagctgggattacaggtgcccgccaccacacccggctaatttttgtatttttagaagagatggggtttcaccatgttggccaggctggtcttgaactcctgacgtcgtgatctgcccaccttgacctcccaaagtgctgggactacaggaatgagccaccctgcccggccagaattttctttcaggacatcaggaggatcctctgctggaagaaccaacatctgattgcagatgttgcctctttggtggaaggtcagtaacacaaatcttggatctgtggtgtttgagggctgaaaatatttaagcatcgaactttcagtcctttttttttttctttttttttgagatggagtctctgtcgcccaggctggagtgcagtggcacgatctcagctcactgcaacctctgcctcccaggttcaagcgattctcctgcctcagcctcccaaatagctgggattacaggcgcacaccaccatccccagctaaattttgtatttgtagcagagacagggtttcatcatgttggccaggctggtcttgaactcctgatctctgatgatctgcccaccttggcctcccaaagtgctgggattataggcgtgagccaccgcaccctgctgaagtttcagtcttcataattgcagatgctttagttggaaacgttgtcataggaaaagctgttttttctttctctttgaatcatcaaacacatcttgcaatggttttggccatgttatctctggtgacctggaagcgactttgatattaagcttcagagtatgctgaaacaagtcaagacttttggtgatgttaggatggtaagcatgtattttgcatgtgaggtcataaatttagggagcaggtagaaaattattgctttatttgtcccctgaaattcatattattattatttttttgagagagttttgctcttgttgcctaggctggagcgcaatggcacaatcttggctcaatgcaacctccacctcctggtttcaagcgattctcctgcctcagcctcccaagtagctgagactgtaggcatacgccaccgtacccggctaattttttgtatttagtagagacagggtttcaccatgttggtcaggctggtctccaactcctgacctcaggtgatccatgcacctcggcctcccaaagtgccgggattatagagatgcgccaccacgcccagccctgaaattcatattttgaaaccttactccctaatgtatggaatgaggagataggatgcctgggaggtaattaggattacttgggatcatgagggtagagttctcaggaatgggactataaggttccctagagagcttgcatttgctctctattatgtgaggacacaatgagatgaaagccttctttgaacaaggaagcttgcccttaccaggcactgaatctactatcactttgatcttggagttcacaatctcctgtatactgaggagcaaatgttaggtgtttaatacacccagcttatgtcattttgttttaggagcccctggtggataaagcacaaccccattaaaaaataggtgaaggagttgaatagacatttctctaatgaggatgtacaaatagacaataattacataaagaagatgttcagcatcactcatggtttagggacatgcaaatcaagagcaaaatgacatctatatcccctcaccctcattagtttgcttctgtccaagaacaaaataacatgctggcaacgatgtggaatagtgaggacccttgtacactattgatggaaatgcaaaatgtcacaactacttttgaaaactatatggcaggccgggtgcggtggctcatgcctgtaatcccagcactttgggagcctgaagtgggcagatcacctgagattgggagttgaagaccagcctgaccaagatggagaaaccccatctctactaaaaatacaaaaaaattagccgggcatggtggcccatgcttgtaatcccagctactcaggaggctgaggcaggagaatcacttgaacccgggaggcggaggttacagtgagtggagatcgcgccattgcactccagcctgggcaacaagagcgaaagtccatctcaaaaaaaaaaacaaaaaaacaaaaaaaaaaacaactgtgtggcaggtaatcaatacattgaaaaaatggaaataacatccaccatttttcccttctgggaatataagcaaaagaatagagacgggggcctgaaatgggtatttgtatacatggtatagcagtataacttaccaatagggaaaatgtggaagcaactctcttgtatattgacagatggatgaataagcaaaaggtagtatatgcataggatagactattactctgccttcaaacggaagggtgacctgacaaatgctacagcattgatgaacttggagcacattatgctaagtgaaatagtccattcatataaagacacaccttataaggtcgagtcacttgattttttacaacctgtctccagacatgggctccttaaactccagacccaaaatgtttttgcttatatgaggtactcagaggagtcaaattcataaagaaagtagaatggtgattgtgtggaataggggaagtgggtaatggagacttatgatttaatggcataaagtttcaatattgcaagatgaaaagggttctggagatagatggtggtgatggctgcacaccaatatgaacgtactgaaagccagtaattctacacttaaaaattaagatgggccgggcacagtggctcacgcttgtaatcccagcactttgggaggccgaggtgggtggatcacctgaggtcaggagttggagaccagcctggccaaaatggcaaaaccccgtctctactaaaaatacaaaaatgagctgggcatggtggtgcatgcctgtaagcccagttactcaggaggctgaggcaggaggatctcttgaacccgggaggctgaggttgcagtgagctgagattgtgccactgcactccagcctgggagacagagcaagactccatctcaacaacaacaacaaaaaattgttaagatgataaattgtattttttctgtattttagtaccattaaaatacgtgggattggtcagagtggtggatagggaaaggacgcaaaccttctgagaggttggaaggttctgcagagccctgggggagaatagctgaaggtggctgttctataaccctgaggcagagggcatggagtaggtacaagggagtgtgggggaatttatcttaaacaggcttgtttacttgtgttgaccaggaactgacctttcatcatccctgtgcctgacgttccctgaaaggggaacaataagtgttaattacctacaggttgtgttggctccaggtttttggcattgtgcctagactgaataaaagcaagcagctccagcttcttggggctgctttctggccactagagccaggcagtcacctagttgctgttacactgaatacctgtgtctgagtcctcatttcatccgttggccagggtctgcaggacagacccggcattaaaagagtggggagccacagtagtgcaaagaccccactggaccaccaacataccaagcagttcttggttcaatccctccttgtcctcaacactgtttttccattttccttgtccataaaggacctgtttccacatgcttgctttgactctgatgtcacctttagagttgatgctcaggcatagctcacttaactgcctcaccttttctctcctgatctggttgttgatggctgttgtgagacattggttgttgcctttttagtttaaaaggattcaaatgacacacagcaatggagatgcagtatatggcaatttattgcaaacgaaaaagtattttgaaagttaagtgcagaacagacagtatgccctgagagagagaggaggattcagggcaggctgctcataaggatgagacagcaaacagtggcactagggagactttttaaaaaaattttaatagttagatttcagctcttttgagtggtttcaagtctgctgtggaggaagggggtagggggaaggtgggcatagcccgagaggcaacagactccagaacattccagacacagtccttcagaggctggctagtattaaggaaagtggttaggtttgtgaggtgaaacagtggatgcttgtggcttttccgcagtgtgtgcagtcaggccagcttgacttggaggaaagccattcaacacaaaaatggcaccacagttaccctggaggtaactgtgaagcacagggtttgagccacctccatcatcctcagggcactgtgtgtttcaggatactctgtggcactgctttcttttcttttcttttcttttttttttttttttttggacggagtctcgctctgtcgtccaggctggagtgcagtggtgcgatctcggctcactgcaagctccgcctcccgggttctcgccattctcctgcctcagcctcccgagtagctgggattacaggcgcccgccaccgcgcccagctaatttctttttgtatttttagtagagacgaggtttcactgtgttagccagggatggtctcaatctcctgaccttgtgatccgcccgcctcggcctcccaaagtgctgggattacaggcgtgagccacagcgcctggccgagagactccttttatgggaatcttacatgattattcataaggggctgggaagaggtgttactagtaagcacattctgggtggtcttctgggtgcacatgcacagtagctgcccattcttgttcatacgtcacatctcattagcatcttaaatctccacccagggatgtggtttttactattataatgagcaaagggtcaatctgaagacaggtaaaataaaaatacgcgtgctccctacaggggaaattccctactggagagagctttgcttgaatgagcttgactacaatgcgaatgctgaggcttattgtgttgactgtacgattgccaagtctccaggacatggttacttccttggctacctatcctgtctcatggtcctcagtcacttcacacccatgatgtatgctaacacccttcggttatctgtttagaagggataattattatttttttctttttgagacagagtctcgctctgttgccaggctggagtgcagtggcacgatctcagctccctgcaacctctgccttctgtgttcaagcaattctcctgcctcagcctcccgagtagctggaactataggcatgtgccaccatacccagctaatttttgtatttttagtagacgaggtttcaccatgttggccaggatggtgtcgatcttctgacctcgtgatccactcgcctcggcctcccaatgtgctgggattacaggcatgagccaccgcgcccagtctagaagttataattttaactttccctgaagaacactcataaacataagttaaggattgcaatgttttgttcatgaacaaatcttccagactgtgagaattaagcaagataaactgaaaataataataatgcgatacagattttcctaactacagaaaattgaggaaacatactacaaaatgtggaatgactgacctttaattctacctgggctggaggttcaagaaatggacagaaggggtcactacatgcacaggaaagaatttcctaattttaccagtagagctgatgttgaaggagaaatatgtgctgtaacaagagaacttcaaagtaggatgaatgaaggaaatcttacccccctaataatatggaatttatgcagaatcaatttttacttcagaaggtcagtaaattctgctttcatccaatgtctttacatgtagaattatttttcattatcattgttcttaccttttgtagtgattactctgttgtttatcaagtaaatgataacccgttaccatcagcatcacttttcttgtgatatatagctaactttcagtgatgtacaaaaatatttatcaactatagctttcatatttttgcattcttggggtattttgttacatgtataacaactcttgagattccacacataacaatacattcttaggattattactttgccattggtagtcactgggtttgtccacttcctgtatggtgttatttgcaaatgaaatacacacatactacatttttatatgtggtaggtccaacaacctatcaactgattattttacaggtgaagaaatacacatttagtctgtcttttatagttataatattctttaatagtcatctttgttttctcttgttttttgccatcatttgatgtcagactgaagaactttctttggtctttcttgtaaggcttgtgtgctggaaataagttctcttagtatgtatgcttaaacctgggaaagtctttgttttgacttctgatttgaatgtgagctttggtggatatagaaatgttctattatatatgtttcagagcagaggaatagcatctaactaaaagcaaatatgtctatttcacccaaacacttatcattacactagtttatataagttaatgtcaaaaaacaatgagcaataaataggaataggatggaagaaggaaatattgtgattgaagatgaaaccgttgtttgggaaagtaaagacaaaacaactggaaaaaaattttaagctggggaaggaggcaatttgctgtgtatggagcaaacatactattgaattaaaatcacatttcttgaaaatgtatattaatttctaagaatagcactaataccctatgccgtatctgtggaaaggtatgagtatttcctgatgaaatgacctgagtgtcacctctatagatttatatataactttgatggattgaaggttcctcatcccagtcctcactgtagagaaatggtttaaatataagtaattcaggaatctgatccaaattaactcgtgtataatattccagaaaaattcacaacatcaaagaaatgttttgaaatttatacttttttttctgacagagggcctcactgtgtcacccaggctggagtgcagtggtgtgatctcacctcattgcagccttgacttagtggactccagaaagcctcttgcctcagcctcccaaatagcagggactacaggcataggccatcacacctgactcattttttaattttaatttttttttttggtagagacagggtctcactatgttgtccagtccaggctgcctcaaacccctgggctcaagcaatcctcccaactcagcctcccaaagtgctgggattataggccattgctcccagcttattttttatttattattattattattattatttttttttttttgagacagagtctcactcttttgcccaggctggagtgcagtggcgctatctcggctcactgcaagctccgcctcccggattcactccattctcctggctcagcctcccgagtagctgggactacaggcgcccgccatcgcgcccgattgaggttttgtatttttaatagagacagggtttcaccgtgttagccaggatggtctcgatctcctgacctcgtgatccgcccacctcggcctcccaaagtgctgggattacacgcgtaagccaccgcgcccggcctatttttaattttttttagtcatggtttagcttgatcacccaggctgttctaaaactcctgggctcaaaagatccttcccgcctcagcctccctctggggtagctgggaccacaagtacttgccaactcacccagccttttattatcagtgcctaatgcttaaggaggatgtgggctaccttttactttcagataaaaaacattgaggtgagataattctgttaattttttttaacacaaaggttcataacttgaataggtagtttcttgcctaaatcatttaattaaaaaatttcgttttcattttgtagtctcttggatcttggagttgattgaaatgtatttttaatagccaagtagattcacttttatatggttttaaaattgttgtgtatataaggggcatttgaaacattagatttttgtatttgctgtgactttcctactggccagtgtgccaggtaccggatatcctccgggaactgcaggcaggcccgtctctctttcacgggtgagagccgcagcctactcttggcggaagcggaaaccctttcctccatcacgtttcgcccattccaggccagaagcaggccccgctccttgctgctcgcctgtgagcatatttcgtcgaatcccggctgggcggcttggtcgcagtgtgcctgtgctgggcccggagcgcgttcatcgcccacagccgctccagttcttgcgagtggttgttcctgcacgccaggagccgtgggccgggccatcaggccatacaagtgctgcgaaagcggcctcgccttcggctgcatcatctcggggatgtttcacttgtctcttctcccagttccagccccagcccctcgaactcaccgggtctccacagcacactctgatcaatatcccacaggtgaggaatataaaatactctttataaagtggaagctagtaagtcgttcttttcaaactttcacaagaaactacagatctttttaaaagattctgattcagcaggtcattggggaaggcctgatcctctgcatttctgactcggtccccagtgtcgtccatgctgctggtccgcggaccgcagttagagtgctgaggtagtaatagacctggttaggcaggcaggcaggcaagggactgatcccatggagcctggtgggccgtattaaggacttttattggatttcgagcagagaagcgacgtttgggttgtgttttaagaagctacagaacaagttctgccaaagtggaagcaaagacaggttacccactcctcttttgcctcctcgcctcttgcctcgtcgcgggtgagctatgactatctggggcagtggtgcgccgggggtaaaagtatttaccaagacaattgtaggtaaaggaaggcaggtttatcggagaaagtatgaaaattcgttgcgaggcagcaacaggcaggtcagcagaagagaagctgaatgcagggaaacaggcttgctgaggattttatggactggaactttggctgattgataacgccaaggcagcagggggctaatttgcatttttctggccgctgtggtgtttgataaattgaagcgtttgttgataagcaggaagtttgagttatgtatgttatctgagcaggagggccatatgtcctgggccataaagcagacctataacttatctgcctctttttgtttatatgtcctggaccatgaagaaaggcagatttgtagcttatttactttatctctttgctttctgcggctctcgccagcctgatttttttctcccctaattaggactctgcgtgcctgattgcttttctctgccttccttacttgcaactcccaaggtcatgtgtccgtgagagtggacctaactcagccgctaactcagcctcgagctacacaaaaaagggactggactgggctaaggcttcaaaaaagggtgggccttgggtaagatgttccagctggtccagcaccctcctgtcccatttcccaggccctggcagtccagaattgagtaaaacatactgagataaccctccactggtgaacctggaggaagatccatcctgtaggaggtgagagcctgggaaaggacatcactatggagggaactgaagttggggtggaggtcggtggatggggtattggaagtggcttgagaccaggagatgagtttaaagtcctcaggtgcctgtgggtaaagttctgacaaaggaaccaggaagaaataagagtcagatgatgaaaaggatcaggactgggggaaaaaacaaggacccaacctggtgatcgggattaaacaattattctgggcaggcaagggcaagaaatagataataaactggaaaaagaaatcgctggtgtaggagggatatcagctgagaagagttggtccaaggctcttggtctacactccacatcctgtggggtgcacctggtgggcaactaggagagaagaagggcccgacgtccagtaagggaatcagaatgtgaatgccgtattgctgtggggaaggatcacaggccacctggagccacctaagtgaaaaccagggtcagtgcctggggatggaaggatctgaatggaaactcacttaaggccaggtggggtgacctgagtagcaaacaggtaaaagttgggtaggaggacctgatttggatggggctgctcactgtgatgtctatgaagctatcattccagctgctgtccacctaggagcagttggtcagtacagtcagctgcgtgttcccatcttgtgtatgagggcagtactgaaggctgcccttcatgcctgccttgatcactggcaggagacagaggacgtggaagtatgggttgtttggggggatggtgcctatgaggaaggtctgatcccaaatctagagaatgggagggtgggatgtatcatggagggtcaggccgggggtctggaggatatcatgtcctaaatgcagatgttctctgggtctcaggtccctgctaccagcccagcctggtgaggctccagatgagtcaataaccctggctcaggagagctggtgtaggatctgttaggccaaggggtctggcttccttactacctcccacttctacctctgtagaaatgtctgtctccagcatcatgtcaaagcaactgatgacttccctaccccaggcatcactgagctaaactgggtggcaggaaggtgatcaccacctaagtactatctttttttttattttgtattttgagacagagtctcactgtgttgcccaggctggagtgtagtggctccatcttggctcactgcaagttccacctcccaggttcacgccattctcctgcctcagcctcccgagtagctgggactataggcgcccgccaccatgcctggctaattttttgtatttttagtagagacggggtttcaccatgttagccaggatggtctcgatctcctgacctcgtgatccacctgcctcggcctctcaaagtgctgggattacaggtgtgagccactgtgcctggcccacccaagtagtatcttatcccttctctccttttcatcccagcctgtgcccactgatcgcttggttaccggtcccattatccactccagctcctggtacttctcttctgggtacagctgaaccacctgggaagagcaagctaagaagttctggtgccccccttgcagcaaggctatcagtgggcacaagaggatggggggatgggctggagtaagccctacccagagcaggagggagccccacacagttctccctcagctgttaacttcctagagacccacctcacagtcaagagcaccaacgggcactcctccctccactccccttactggggcaccagtttctttccaccccaggtgttcactatccccgttatttcaattctcatggctcacaggaagaaataggtatattgtactgagatttttctttctttttttttttttaaaaaaaaaagacatttattcagcatcacgatcagactattacatttagcaatcaacagcatggggtgcaaaaagaaatctacgttaaaaccctttgttggaatgctttacactttccacagaacagaaactaaaataacctgttatacaattagtcacaaatacagtcctcgagttttttgcccatacacatgagtatttgtctaaaacatgtcttctttgtagcagctaggccctgccaccactgtgcttggctgagttcacaaatctattgtaacctgtagcttccctgtcacttctctggctctcctctcctgctaagctttgtttcctaattaaaatcttctgccactgccatagctactgctgctgctggaaccgccatagccacttggtttcgtggttttgcaaagtattggcctccaccgccataggggccagagcttctgcctccaaaatttcctcccttcatgggtccaaaatttgaagactgattgttgtaattgccaaaatcattgtagcttccaccacctccaaaattgcttccatcattaccaaatccattatagccatccccactgccaccatatccaccaccaccatggctgccaccaaagccaccacgaccactgaagtttcctccacgaccgaagttgtcattcccaccgaaaccacctccacgaccaccaccaaagtttccagaaccacttcgacctctttggctggatgaagcactagccatctcttgctttgacagggcttttctaacttcacagttgtggccattcacagtatggtatttctgaatgacagtcttatccacggagtcatggtcgtcaaaggttacaaaggcaaagccccttttcttgccactgcctcggtcagtcatgatttcaatcacttcaatttttccatactgttcaaaataatctcttaggtgatgttcttcagtgtcttctttaatgccaccaacaaatatctttttcacagttaagtgggcacctggtctttgagaatcttctctggagacagctctctttggttccacaactcttccatccaccttgtgtggccttgcattcatagctgcatccacctcctccacagtggcatacgtgacaaacccaaagcccctggagcgcttggtgtttggatctctcattaccacacagtccgtgagcgttccccattgctcaaaatggctcctcaggctctcatcagttgtttcaaagctcaaccctccaatgaagagcttcctcagctgttcgggctctttaggagactctgacttagacatgacggcagggtgaagagagactttaacgatgcttcttcggcggtgtccacgggcagaaaagcgagatttttctaaatgacataaaaatatgtattcgtgaaacagtcttttcaagataaggatcccatccatcggactcaaacattacccgctggtccttggtaatcttgccccaccctagtgcttcttctctctcagccacccctgatggaatcctgcagtttgtactgttctgtgtcaggcatctttcactcagcataattgagcttcatccaatagttctttattgtacatgaataatattccatcttcagaggaagcaaaatttatttctccagctgttgatggatatttgggttaatttcagtttttggctattaagaattaaacatatgaatattcacataccagtgtttgtaagaacatatgatatttcttttttgtttgtttgagacagcctcgctctgtcaccaggctgaagtgtagtggcgcaatcttggctcactgcaacctccgcctcccaggttcaagccattctcctgcttcagccttctgagtagttgggactacaggtgcgtgccaccacgcccagctaatttttgtatttttagtagaggtggagtttcactatgttggccaggctggccttgatctcttgaacctcgtgatccgcccacctcagcctcctaaagtgctgggattacaggcatgagccactgtgcccagctgattatttctttagaagattttattttattctacctaggaataaaatggctgggtgttgtgacaggtgtatgtttaacttcttaggaaacttccaaactgttttccaagtggctgttccattttgtattcccaccaacgtcataagagttccagttgcttcgcattgtcaccaacatttgatatagccaatcttactaattttagactcccaaatatgtgtagtggtattagaattgtggcttaatgccaggcacagtggctcacgcctgtaatcccagcactttgggaggccaaggcgggcggatcacgaggtcaggagatcgagaccatcctggctaacacggtgaaaccccatctctactaaaaatacaaacaattagccaggtgtggtggtgggcgcctgttgtcccagctactccggaggctgaggcaggagaatggtgtgaacctgggaggcggagcttgcagtgagccgagatagtgccactgcactccagcctgggtgacagatcgagactccacctcaaaaaaaaaaaaaattgtggcttaagtttgtgtttacttaatgaatgatgatgttgaatgatatttcatgtttttatttgtcactgaaaaatattctgtggtcaagtattaatgacattgattgttttcagattattagtttttgagagttctttatatattctggatataattgctgcatcagattatggtttgtatgtattttctcccatctacggctattctttaaaaatccttagcagtctctaggccgggagtggtggctcatgcctgtaatcccagcactttgggaggccaaggcgggcagatcacttgaggtcgggagttcgagaccagcctgaccaacatggagaaaccccatctctactaaaaacacaaaattagccaggcatggtggcacatgcctgtaatcccagctactcgggaggctgaggtaggagaatcgcttgaagctgagaggcagaggttgcggtgagccgagattgcgccattgcactccagcctgggcaacaagagcaaaactccgtctcaaaaaaaaaaaaaaaaaatccttagcagtcttatgcctataattccagtactttgggaggccaaggcgggcagatcacttgaggtcaggagttcgagaccagcctggccaacatggtgaaaccccatctctactaaaaatagaaaaattaaccaggcatgatggtgtgtgcctgtactcccagctacttgggaggctgtggtgggagaattacttgaacctgggaggcggaggttgcagtgagccgagatcatgacactgtactccagcctgggtgacagagcgagactctgtctcaaaaaaaaaaaaaaaaaaaattccttaactgtatccttcacaaagcaaatttttattttaatgaagtttaatttctcaatttttaatggattctgcatctttgtcatatgtatgcaattgtaacgtaacccaaggtcaaataatttcacccacattttctttacattttatagtttagattatacattcagttttgtgatccattttgagttaatgtttgtatatagtgcaagacacagatctacagtctttactttttgcatatgcatattctattttttagcattatttgttgagaagagaaattttgactcaattgttcactttgattaaaaaaaactactggaccacatgtgtagaaatgttactggaacatttattctgttccatggatatatttgtctacttgccaaagacattgtcttgattaggattgctaaattttctttgtttttttttcagaattatttggctatttgtttggttatttcaggtacttttcaccttttttttttttttttttttgagatggagtttcactcttgttgcccaggctggacaacaacgacaacgcgatctcggctcaccgcaacctccgcctcccgagttcaagtgattctcctgtctcagcatcccaagtagctgggattataggcatgcgccaccatgcccagctaattttgtgtttttagtagagatggagtttctccatgttggtcaggctggtttcaaactcccgacctcaggtgatcctcctgcctcggcctcccaaagtgcttgggattacaggcatgagccaccacgcccggccttcatcataattttataacttcataatacattgttctttttctttttcttttttaaaagattcaatgattttttttaaagcaataaaaaatagtaaaaaaccctttgtgtttactgaagtggttatcatttctggtcctcttctttctttccggatttccacttggcttcatttttctttgcacccatgcagtttagggatgtctcttatggagcaagtatgctgattacaaacactttcactatggctgaattaataatttattttcccttcatttggaaagatattgtttgctggatataggattctcagttgatatacttgttctttcattactttaaggtagttgttctatggtctcctgatctgcgctgttgctggtaataagtatgtaatgaatcctatctttggttcagtgtagttaatgtgtctttttcctgttgccttaaagctattttaattgttcttgctgtgaagtagtttactgatgatgtgcttggtgtagatttatatacatatatgctcatggtttgttgaacttttttgatttctgggtttataattttcatccagtttggcaaatgtgaaaccagtatttgttgaaatattttttgtcatgctctttcctctgccaaagagtcttgttatttgcatattatgtcacttgtaattttcccactacacagctcactgattttctgttttttgttgttgttgttttttttgctgggtgcttcatttgggatagtttctactgctaggtcacaaggttcactcgtcttcttctctgcagtatctgatttgctgtttattccactcagtgtaatttgttatcccagatgttgttttcatgcctagtagcttgaatcatgtttttttctttagtttttagattgtttggaggtaaaatatactaacagagaatttgccatttcgatcatttttaaaatgtgccatttagttgtagtaaataaatttacgatgtggtgtaaccaacgcagctattgatctctagcattctctcatcactctaaacagaaattgggtactcattaaacacgtccccagtctcccttccccccagctcctgataatgtctatcctactttctctatgaatttggctattctaggcacctcatataacgggaaggatacaatatttgtccttgtgctgggcatggtggtttatgcctgtaatcccagcactttgggaggctgaggcaggcagatcacgaggtcaggagttcgagaccagcctgaccaacatggtgaaaccccgtctctactaaaaatacaaaaattagccaggtatggtggtgtgcacctgtaatcccagctactcaggaggctgaggcaggagaatcgcttgaacctgggaggcagagattgcagtgagccaagatcacaccactgcactccagcctggatgacagagtgagactctgtctcaaaacaaaacaaaacaaaaaatttgtccttgtgtgtctggcttatttcacttagcataatgttttccaggttcattcgggttgtatcatgtatgaggaattcattgctttttctgtctgaatgatacttcattgcacggagaaaccacactttgtgtgtctactctaaacacttttctttttttgtaaagattttaaaaatatatttaaaaactagtttgagagtaattgaattaaatcattgactggaagagttgtttctacagtaatattttggctactgtgaattaagatggctatgaaattggtatacatgtgtctgtgtaagaccctgcttttacttcttttgggtatatacctagaagtggaattgctggtgtaaagagtaatggatgtttcccttttctttttttcttttttcttttttttgagacggagtcttgctctgtcacccaggctggagtgcagtggtgcgatcttggctcactgcaagctccgcctcccgggttcacaccattctcctgcttcagcttcccgagtagctgggactacaggcgcccgccaccaggcctggctaattttttgtatttttagtagagacggggtttcaccatgttagccaggttggtctcgaactcctgacctcatgatccacccgcctcagcctcccaaagtgctgggattacaggcatgagccgctgtgcctgtcctgtttttgtttttgtttttgagatggagtttcgttcttgctgcccaggctagagtgcaatggcgtgatctcggctcatggcaacctctgcctcccgggttcaagtgattctcctgcctcagcctcccgagtagctgggattacaggcatgcaccaccacgcccggctaatttattttgtatttttagtagagacggggtttctccacgttggtctggttggtctcaaactcccgacctcaggtgatccacccacctcggcctcccaaagtgctgggattacaggggtgagccaccacacctgaccttccttttaaatttttaaaatgtttgcttcatatattttgggcctctgttatttagtgcaattatatttataactgttatatattctgtatgatttgagccttttatagtgctcttctttgtgtcttttaacagtttttgacttagtctattttgtgtgacaattgtatagccacccctgctctctttacattactatttgcatggaatatctttttctttcattctctttcaactgacttgggtattgagatctacaatgaatgtgctgtagacaggatacaatttgatcatattttaaagattcattctccctgcctctgtcttttgtttggcaagtttattccatttaattaccgataacgaaggcattatgtctgccattgtactattcgtgttctgtatgactaatagctttgtttttcataaaatacgaggaattccttatgttttcaaaatcagtgtctagtttcttggcttttgattggaaacttttattaacacttaaaggagggagcatagccacactctgcagaggggacaagagggcaagttgaactcccagagctgaatccttatgtatcttgcctcatcaccatgacttggtaatgaggcagggacactctggggacccatttctttttcttatcttttttcttttttgagacagagttttgctctttcgcccaggctggagtgaagtggcacaatcttggctcactgcaacctctgtccgctccccccgccgccccaccccgggttcaagcgattctcctgcctcagcctcctgagtagctgggattacaggcgcccaccatcatgcctggctaatttttgtatttttagtagagacggggtttcaccgtattggcaaggtttgtctcgaactcctgacctcaggtgatccatccgcattggcctcccaaaatgctgggattacaggtgtgagccaccgcacccggcctctggggacccatttcaacagtctggcacccatggttgggaatatgtttaacctctaaattggggttttcctgctgaactgcgtctgaaagactgcttctctgagctagctcatgtttttgctttttctctctattgattcctttatagaatattgctgtcatataagtccagcttttccgtgaatttaacagttttatcctgttatcgatgtgtttttattttcttgaaaataagcagattgagacatcagatgggagaaaggcttgactatgtcgccagcagcctcatgccaaattcctgattcctggaggacagagcccccctcctgctccaaggccaggagatggcgccactggacagtgagtctgggattcctagcacacacttgtgattgctggtccaggaaaaagaagcaggaagggccattagtacaatcagtcaggaaattctgcttaagtgcacatttctccccaggagagtcgggtcactgcactgggaggaagcccgcctgccaagggctgtgtctggaacctgttcatcgcgctccactcagcacagtgagatcgcctcttctgttactcggtctccagggggcgggacctggagccgtatccaatcagggccatggggtggggtcgtgagaactgtggatcaggcgcactgcagggaggtgggtgcgcggcatcttcacccctctaaatgcggctcctactctgtagctgacagacacccacagacgtgtctgtagcatcctctgtcacactgggacccgtactggcagcaggagccgtagggaggactgggacacctggaagccaggaattggtgagtgtgcggggctgagggtcccgagactaggatgggactggttggaaccggcaggaatagaccgtggcgggacccgggcctcttcgtagttgactctgggttctgagacccaagtccccctggcgcacctcggccctggttcctctcaggccgcagggtggggctgcgacggcagccgagacccctagccgtccggtccagtccctgtgcaactgactgtggccccaggcccagcgccctctctggtcagctccgcgcccgctgccccagtcacgcccgctgcctccgtgtctccccagattgtacgggggccactagagggtcatgggggaaatcctgcctcgagtatggggttcgtgtgagaggagctgtaggctgtggggtccccagttccctctttctcaccaggggcttttgtattttatctgagtttcccaaatatacgcgaagcagggtctcaaatccgcgactgtggtccctaggctaccttctcctaaggctggcagcaaatttgggatttcctgatccctttccgcattttataacacggatttcctttagttcacaacagtatcacttcttcgtcctccaggctatgtttcaaacacaggcagtattttaatcgtcatttttttagagggcagtatatggccgttttaaaaatatttgttttgtgtttgtgaacgtttcagagaaaaaccacctgacactccgctgtaaacaatctttgtgtctctttttatctgccctaggcacagacaccttctgagaatgtcttgggttgagattcccctttggaaactttacagtgatgcgacctcagcccaccctctgccttttcctgatcctgggtttcaggactacctggggctggcccaagatgcctacagctgccaagtctcttgggaaagtctagtgaatatcagcccctaggtcgttcctcccaaagagcctgaggtgtggcggtgaggcctccccagggagcagctggatgctatggggtgggaccagtctcctatatcattattgtaaaaaactaatcccttgggacacgccttttcttctccaacccgtttccattccttggggacacatggctagtcagccaatcaaattctggtatggaggaaaccaaattatttctgtcctgtaatcctagcactttgggaggccaaggtgggtggatcacctgaggtcaggagttcaagaccagcctggccaacatggtgaaaccccgactctactaaaaatccaaaaattagctgggcgtggtggtgcacccttgtaatctcagctactcgtgaggctgaggcagaattgctagaacccgggaggtggaggttgcagtgagctgagattgcgccactgcactccagcctgggcgacagggcaagactccgtctcaaaaaaaaaaaaaaaaaaagaagaaatgatttctgtcctctggattctctcagtctagtgaaagaagaaaaccacccccaatgagttgttgcaaggacctgaaaagcacacagttgagtgtcttctgggagggtggtcactgagcacttcagggagcagcttggaggtggggggatgtcccaagtgataggatgatgtgacctgacacttgagtcagacacttgagtgtttcaggtcagcactgcccctccctgggtttatcaccttgaaaaaattggtttactcatttcagcttcaggtttttttttttttttttgagacggagtttcactgttgttgcccaggctggagtgcaatgacgcgatctcggtttgccgcaacctccgcctcccaggttcaagtaattcttctgcctcagtctcccaggtagctgggattacaggcatgtgccacaatgcccacctaattttgtatgtttagtagagatggggtttcaccatgttggtcaggctggtctcgaactcccgacctcaggtgatctgcccacctcagcctcccaaagtgctgggattacaggcgtgagccaccatgcccagccatcagcttcagttttttttttttttttcttttaggattgcttttatgagctaggcatatttgtatgggaagggggaatttttttttctttttttagtatttatttatcattcttgggtgtttctcggagagggggatttggcagggtcataggacaatagtggagggaaggtcggcagataaacagttgtgaacaagggtctctggttttcctaggcagaggatcctgcggccttctgcagtgtttgtgttcctgggtacttgagattggggagtggtgatgactcttaacgagcatgctgccttgaagcatctgtttaacaaagcgcatcttgcactgcccttaatccatttaaacctgagtggacacagcacatgtttcagagagcacggggttgggggtaaggttatagataacagcatcccaaggcagaagaatttttcttagtatagaacaaaatggagtctcctatgtctactactatctacacagacacagtaacaatcttatctttcttttccccacatttcccccttttctattcgacaaaactgccatcgtcatcatggcccgttctcagtgagctgttgggtacacctcccagacggggtggaggccaggcggaggcgcccccccacctcccagacggggcggctggccaggcgggggctgccccccacctcccttcctcctggacagggcagctggctggtcgggggctgccccccacctccctcccggacggggcagctgccgggcggagaccctcctcacttcccagacggggcagctgccaggcagaggggctcctcactttcccagacagggcagctgctgggcggaggggctcctcacttctcagacggggtggccaggcagagacgctcgtcacctcccagacggggtggtgttcaggcagagacactcctcagttcccagacggggtcacggccgggtagaggcgctcctcacatcctagacagggcagtggggcagaggcgctccccacatctcagacgatgggcggcaaggcagagacgctcctcacttcctagatgggatggcgccgggaagaggcgctcctcacttcccagactgggcggcagggcagaggcgctcctcacatcccagaccatgggcggccaggcagagacactcctcacttcctagatgggatggtggccgggaagaggcgctcctcacttcccagactgggcagccgggcagaggggctcctcgcatcccagatgatgggcggccaggcagagacgctcctcacttcccagacggggtggcggccgggcagaggctgcaatctcggcactttgggaggccaaggcaggcggctgggaggtggaggttgtagcaagcccaggtcacgccactgcactccagcctgggcaagattgagcactgcgtgagcgagactccgtctgcaatcccggcacctcgggaggccaaggcgggcagatcactcgcggtcaggagctggagaccagcccagccaacacggcgaaaccccgtctccaccaaaaaatacaaaaaccagtcaggcgtggtggcgcacgcctgcaatcccaggcactcggcagtctgaggcaggagaatgaggcagggaggttgcagtgagccgagatggcggcagtacagtccagcctcggctcggcatcagagggagaccatggaaagtgggagacgagggagaggctcagcatcagagggagaccgtggaaagtgggagacgagggagagcagcttcagttttttaataactgtaaaatgcactatattattagagatggatggagaagttaaagtatttccaaacatgccagaagaaggtaggttttggtaggttttaggaaaaaaaaagtctagtcttgtattcccttataaaaattcttatttttcttcccagagcctgggtagtaagtttctcagctcctttttctattgggtgatttcaaatggaattctaggccttagcatgaaaatactaccagggaaaagaaatagggaaaaaaacctctcttccattttggttacagaaaaaatgagttgttttcaaaagaaagtgtggtggattatactggtgaattacaaagatgttccataacctcagttcttctccttctcaggttgaagaatttgtgaccgtggataagttcgtttcctgttatgtgaacttggcagattaatgctaaatcctgtgggacagcatttagcaacacctaaaaaagtactcaattatgattttttgtgtactaaatgattatggaaatactaattctgtgtggaaagaacacactcaaagggctttttctattctttcaataacaacaatcaacacagaagacttttgtgaccaaaagcgtgggttttctccctaccaaaaggcaagcagtgtatcctgcagtggacagcaactgggtctcttccaattcagttttgacattctctaccctggagatagtttcagagcccataggttgatggctcagtccccacatccctccctccctgcctgccactccctaccattcaggtatcagtggtaagtctggaccaattataacccacaggtttcaagttggagttcttgtgctctctttgggtttaacttgctattgtggcttgcagaactcagggaaacacttactcatcttcacagtcttctttcatttctttttttgtagagatggagtctctctatgttgcccaggctgaactcctggcctcaagtgatcttcccatcttggtctcccaaagtgctgggattacaggtgtgagccaccatacctaactctcaggtttctttctttttattttttttttttgagacaagagtctcacactctgtggcccatgctggagtgcagtggtgcgatctcagctcgctgtaacctccactgcccggattcaagctattctcctgccttggcctcccgagtagctgggattataggtgcacaccaccacgcctggctaatttttgtatttttagtagagacggggcttcaccatgttggccaggctggtcacgagctcctgacctcaagtgatccacccaccttggccccccaaagtgctgggattacaggcacgagccactgcacccagccaaggatattttaaaggatacaaataaacatccaggtgaagagatacatagggtgaggtctagaagggtcttgagcacagtagcttctgtctctggggttagggtgtgccaccctcccagctgatggataagttcttgtttaccttcctataagcctgcatgtgttgagctgtctgggagctttctgaatcctgtactctggggccttttcttgagacctcattggataggcatgattcataactatgtagaaattagctggacaaaaaaggtagaatctaatactgatagactgaatgggaaaatccaccaagccctgtctgttcagattctttttggcttctctatgtagcattccttcctccagggtatgagacaggaccccttctgaaatgagcgtctgatgacccacaatcagaaaagctgggaagattagactccttccttgggcaggtgaaggacagcaggaggtcagtgagagaaattctgtcttctcagtcctgcctctgaagcctacagtgccacagcactataacaggggctgtgacagttacgagccaggaaaaatgcaaaaattagccaggtgtggtggcgcatgcctataaacccagctacccgggaggctgaggcgggagaagtgctggaaccaaggaggcggaggctgcagtgagccgagattgtgccactgcactccagcctgggtgacagtgtgacttggtcgaaattaaaaaaaaaaaagttccacatatccctagggcagaggcacactgcagccaagctctttgctaaggaaaaacaaaagtgacctgtgcttcagttcccaataaatacttataagtattgtcctttccatctgagacctcctcagcctgaactttatatcactatcagcattttggtcacaaccattcagcaagcctctacaaagtctcaaactccctcatcttcctgttgtcttctgagccctccacactcttccaaacctctgcctgttaagaagttccaaaaccaattccacattttcagatatcttgatagcaatgcgccacttctcagtaccaattttcttgtattattccattcttgcagcatgataaagaaatacctgagactgggtaatttataaagaaaagaggttgaattggcccatgattctgcagactgcacaggaagcatggtactggaaggatggcatctgctcagcttctagggaggcctcaggaaactgacaatcatggtggaaggcaaagggggagcagcagttcacacggccagagaaggagcaagagagagcagggcaaggtgccacagacttttaaatgaccggttctcacaagaacttaccatctcaagaacagcaccacagggatagtgctaaaccattcatgaaggaccaccatccagtcacctcccacaaggccccaccttcaatattgggaattacaattcgacatgagatttgggtggagattcaaatccaaaccatgtccttttgcttttttctgttttgtttgtggagtagatttttctccatccctttactttgagcctaagggtgccattgcatgtgagatgggtctcttgaagacagcataccattggatcttgcttttttatccaagtcaccactgtgccttttaattggggcatttagcctgcttacattcaaggttagtatttatatgtgtagatttgatcctatcatgttgttagctggttattatgcagacttgtttgtgtggttgttttatagtgtcactggtctatgtatttaagtgtgcttttgtggtggctggtaatggttttttctttccatatttagcactcccttcaggacctcttgtacagatgttctctttcattgtaatcacacaggatgggctatgtcacccaaataacatgtggtggtgattaacatgtgaaatgttacctgccagggtcacgcattacagactctgtgcccagagtattttttcatggctcttgttttctgttagttgtaatagaatacctgaaatttggctgggcgcggtggctcgtgcctgtaatcccaacactttgggaggctgaggcaggtggatcatttgagaccaggagtttgtgaccagctcagccaacatggtgaaaccccatctctactgaaatataaaaacaaagccgggcatggtcatgcatgcctgtaatcccagctacttgggaggctgaagcatgggaattacttgaactgggaggtcgaggctgcagtgagccaagattgccccccctgcattccagcctgtgcaacagagcaagactgtttccaaaaacaaaaaaaaacaaaaaaccctgaatttgggttaatatataaaaaatacttattttgtacaattctcaaagtttggaaatccaagggcaaatggggtacatctggtgaaagcttcttgctctttactgtctgaggcagtggagatcactaggcacgggggctgattgtgctaactctggtctctttctcttcttacaaggccacaagtcttatttgtaggataacccattcattcattacctcttcaattcgtcagtggattaatccattcatgaggcagagccctcatgcctcttaaagggccctgctttcagtactgacacattggggatcaaatttcgttatgagttttggaaggggaaattattcacacttagcaagggctgattaggtacactgcttctgctgaaaataccacactctcagagggaaaatgggaattaggcaaataccatattgtttgcataagtagttaaggcacacacaaccccatttattagttatgttggtgcagatcttcccaaatctagcccctagataccatcaaagttcaactttctaaataaacgtgtaagaatatgcagtctcagaactgctaatttgtctcttatagacagtatgtttgggactttctcatgagaggtaatactgacccactatacagagagacactagaggtgatccaggcagcatatctcagtctctgaaatcaccaatgagaggcatgtccttgttggctgtcactttactgaatatattcaattctagcatcagaattgctgtgatggagaaagtgagtgtagacagaagacaagaggctgaccaagtcattgaataaatttttggagtccacagcatcgtgtgaacttctgaagtgagtatagattcctaatgctgttggtctgaaccttcctcctctgccatgtgggatgtttcaggactcagtgacctttgaggatgtggctgtgaacttcacccaggaggagtgggctttgctgggtccttcccagaagaatctctacagagatgtgatgtgggaaaccttcaggaacctgatgtctgtaggtaagggtgacatcatttcttcacttagtcaattatagaacaagtgtttcttggtcttctgcattgctcaatgatttggaacatggtagggaatacagcagacccttgaacaaggtgggggttagagactctgatcgtccacacagtctgttaggtgcctgtgaatttagagtccctaaagagttaactactaatagactgctgttgaccaaagctgtattgataacagaaagtcaattaatacattttgtatgtttggtatatatctatatacatatatatggccaggtgtgggggctcacacctgtaattccagtactttgggaggctgaagtgggaggattgcttgagctcaggattttgagactggctgtagcaatgaagtgataccctgtctgtataaaaaataaaaaaagtagccatggatggtggcacacctgtgttcctagctattcagaaggttgaggcagtaggttcgcttgaactggggaggttgagcttgcagtgaaccatgattgcaccactacagtttagcctgggcaacagagtgagtccttgtctcactctgtgtgtggctgggcatggtgacttgcgcctgtaatcccatcactttagaaggctgaggcaggtgcatcacttgatgtcaggagtttgagaccagcctggccaacgtggtgaaaccccatctctactaaaaatacaaaaattagcttggtgtggtggcatgcacctgtaatcccagctacctgggagggtaagggaggagaatcacttgaacctgggaggcagaggttgcagtgagccaagaccacgccactgcactctagcctgggcaagagagagagactccgtctcaaaaaaaaaaaaagtgcgtatgtgtatatatgtttaagacagggtcccttgctaggtctagaggcgagtgccaccatccccagctaatttttgtataatttttttgtaaggtggagggtcgtgaactcctggcctcaagcattcctcctccctagcatcccaaagtgcagggattacaggcatgagccaccatgccaagcctgtttggtatgttatgtactgtattcttataatacagtaagcttttcttttgaaaaggttatcaaaaaaattagaagagaagatatgttgactttagtaagtgcaagtagattatcaaggtgttcttccttggttgtcttcatattgagtaacctgagcaaaaaaggagggtttggtcttgctctcttagagatggcaagagctgatgaaaatgtgcatgagtgaactgtgcagttcaaaaccatgttggtcaaggttcaactgaactttggtgaataaatcagccatggccacagtgtcccatgaacatagaatctaataatttttctataattttgtaataacttatgatgacttttatgggtctgcattttaggaataaaatgtgaagaccagatcattgaagatcagtacaataattccaaaagaaatctaaggtcatttgcacttacaacctagagctatgtcccttaagatattgttagaatgacaacaaatgttaaaagcaagcaaagaaaatgaagcagcccagcttcaaattcattcatttttagaaaaaattttccaggctgggcatggtggctcacacctgtaatcccagcactttgggaggtcaagggaggcagattgcttgagcccaggagttcaagaccagcctgggcaacatggtgaaactccatctgtacaaaaatctaaaagttagccaggcatggtggcatgcacctgaggtcccagctactagggaggttaaggtgggaggatggcttgaacccaggaggtcaaggctgtgatgaatcgtgaacatgccactgtacttcagcctgggtgacagagtgagaccttgtctccaaaaaaaaaaataactattttccaaaaacaatatacttacacaagacataaatatccagtgttttcaaaatagttgccttggagccagtgttaagaaattgattatgaatatcaatgttttgataataagtgtaatgcagcccttttgcagagtattcagtccattgatgtttacacagttcagacaagccagaaaacctactttccatcataatgcaaaatatgtaaatcaaatacctactaatgaatataaaatcatttataaaccagcccttggtattgtgcttatttctcacagaagtcatatggtagagagagtctgaaggtaaggaagatggtcaatgtgaagagatcttcagccttgttccaaatggtatagtgaagacgacttttactggagtcaaatcatgtgaaagcagtgtgtgtgaagaaggcaatatggatcattcatctcttaattgctgcatcagagctgacactggacacaaatcagatgagtgtcagcaacatagaagccacataagcagtgtgtgaaaaccttcagctattgccactcctttcaaacacatgaaaggcctcacactggaaagaaactccatgtaagaaatgtggaaaaaccttcatttctgttcaaaccttttgaagatacatggtaatgcacagtgaagatgaaccttataaatgtaagttttgtgggaaggcctttgataatctacatttatatcttacacatgaaagaactcacactggagagaaaccctatgaatgtaataaatgtgggaaagccttcagttgttccagttccattcgaaaacatgcaagaattcacactggagagaaaccctatatatgtaaacaatgtggcaaagcctttagatattccagttctattcgaaatcatgaaaacactcacactggtgaaaaaccctgtgaatgtaagcaatgtgggaaagcctttagttattccagttactttcgaatacatgaaagaattcacactggagagcaggtgtataaatgtaaggaatgtgggaaaacattcacttatcccagtgcctttcataaacataaaagtacccacacttcacagaaactttatgaatgtaaggaatgtgggaaagcatttgattgttttagttcctttcatagtcatgaaggggttcacactggagagaaaccctatgaatgcagaacgtggaaaagccttcagtagttctaagtacttaaaaatacatggaagaactcacactggagagaagtcctatgcagtaaagaatgagggaaagtattttattgtctcagtccccttcaaagacatgaaaggactcacatcagagaaaagttgtatgaatgtaaaaaatgtgataaagccttccattcgtccagtactgttagaaaccatgaaagaagtcacatttaagaaaaacacagtgatgttaggaatatggggaacctttcctttctcttccagtctttggaaggcacagggtatgacacactggtgaccttataactgtaaggagtgtggataagtatttattagtccttgtgtgttttagatacatgaaagaatttactcaaaaggaaactctatgaatgtaaagaatgtggtaaaacctgtgtagtttcagtttctcttgaataaagtcatttcctggtattctcaggggattggttccagcaccccttgagaatatataattttgctcaagtgctttacagaaaagtgtatttgcctataactaggcaatcctgtatactttaaatcatctctagattacttataatacctaatgcattgtaaatgctatgaagacaactgttttattgtatttagggaagtatgacaagaaaaaacatctgtacatattcagtacagacacaaccaccatacggctacctacctagtacacatcatctacaatataacattttctttttaaaaaacagttatggattggtttcattaaatgacctgcaagcgtgtgttaaccttctgtaaaaccctggttattttctcctggtagcccacacatgatgatgatgaggatgatggtgattgctctgtggtgcctaaagttgcaacatgttgaggtgccaagatatgtggcagtgtcgataagcaatgagatgtcaattaaactagaatcatctgacaggacattagaagtatcatctatgttggaggtaccaacttctgactgcagatgttgactctttcatcaataatacaaatgttggatctacggaatttgagggtcaaagatatttaagcattgatggtcccacagattctagttggggacattatcaaggatgcagtttacccagagcgattaaccctagtggaggagctagattaggaaagtttctggggtcatggttaagtctaggttctacttggaatggatatctaaccagaaatctttcttgtatcattagtagagttgcccatttcaccaccgaagccatcaggacacaagagaagtctctaggttcccttgcctgcatggccctagacaaccacattgcagctatctccctactttacagggtagtgtctgtgctaacccttgcttctgcatctgggtaaaatacttccagtcagactgaattgggaacatataagatcttaaaaccagccaaatctctgaaagggacaccttcagaaaccctcctgtctagacttactgggttacatttccaatttccagatattttcagctggctcttcccctggtataggatttcttctccattctgccctacaagtctcaatgatcctatttaaaatatgcatttggctcctctttaaaattgttctatcttgtttcaacagatgcctccaagagacccccactaggttcttgctgacctaatacttgagattttaaactcactccagctggccactgaaaccaacttaacccaagagattttggctaaaatttaacaggttcctgagaacctcttataagtaaatggctatagttgcccaactggccactgccctgccattaggatccctgcatgggatggacccacagcaggtcactggtaccatgatagaacacacacaaaaacttatgaatgctgtctgtggacgggttagagtcagtccttcacactggctaactgggcctaagttttaaaaagagctaagccgccacttgttaactaggggtcacaagcactgtgagtttcctgaaaaccaacacctttttaactttgggggctcacctgagctagtcaatcagagctcagctgtatcaaccaatcagaactgagtttcaagtttcagatcttcatttgcataaaagcacttgactaggaacccagatgggaacttttgctataaaacctaagctttcccttgttctctggaacaaataatgtttaggttgcaaactccttatgccttttccccagaactatgtagaaataacgccttctaaaatgtgatcttgataccagggaactcctttttttttttttttttttttttttttttgagtcggagtcttgctctgttgcccaggctggagtgcagtggcgtgatctcagctcactgcaagctccgcctcccaagtggctgagagacaggtgcgcaccaccacgcccagctaattttttgtcatttagtagagatggggtttcaccctgttggccaagatggtctcaatcgacctgaccttgtgatctacgtgcctcggcctcccaaagtgctgggattacaggcgtgagccaccgcacctggctgataccagggaactcccagagcaaagcactaaatactttcattcctctaaggtctatgactctaatcagcagaaagtagttagagcagttatcattccttttccttcaagacttaggaatgaacataataggagggatttgtaaccacaacagattatgtggtacaacttctatataacaaagctgagttttcagttgccatggacccaacactcaaggtcacataatctgagcatgcccagatgaaccaaatgtgtaaccatgggtggaacctatatgcttggactgaggtgtggagattaaagtaaaaagtagatgctgggcacggtgactcatgcctgtaatcccagcactttgggaggctgaggtgggtggattgcctgagctcaagagttcaagaccacccagagcaacatggtaaaaccctgtctctgtgaaagatacaaaatattaaccaggtgtggtggcgcacacctgtagtcccagctacttgggaggctgaggcagaattgcttgagctccagaggtgaaggttgcagtgagcgagatcatgccactgcattccagcttgggctacagagtgaggctctgtctcaaaaaaaaaaaaaaaaaaaagataccacatggtggaatctaggatctaatcaggttgggccccggtatcatcccatggcaggatccaatcgagtcacattaacctggcatgagatcattgcaagatgcagtgagttcatgtcttattaccccacgcttataaaacttgccaaagcccccagctcagggagacatatttgagcatttcttcctttctccttgccagtcaaacttgtagtaaagcttttctttcttcaaaagctggtgccatgctattggcttgtgtgtacatctggaagtgagccaattcactacttgctaacataacaaagaatcagcaactgtgaagatgaaacaattaaaattatccagtctgggccaggcgcggtggctcacacctgtaatcccagcactttgggaggtccaggtgggtggatcacctgaggtcgggagttcgagaccagcctgaccaacatggagaaaccctgtctctactaaaaatacagaattagctgggtgtggtggtgcatgcctgtaatcccagttacttgggaggctgaggtagaagaatagcttgaaccaaggaggtggaggtagcagtgaaccgagattacgccattgcacaccagcctgggcaacgagagtgaaactccatctcaaaaaaaaaaaaaaaaaaaaagaaagaaaaaaattaccagtctgtggaaaagaaagaggaaagaaattgagagaatgtgttactagtatacctgccttgccagtcatgttaaagttcttcagagcgaaggaaactgatacaggttaggaaagcagatgtttcagaaataaaacttgttagaaaataattaaatgagggcacaaatatgattatcttttcttctccttcatagataaatgtttgttcaaatgaatatcaacaatgtattgggtggttatagcttctaacaggtcaaatgcgtgacagtgatattatatgggattggaaagaggaattcagaacactcttaacatattggcactaccccagacaccagtatagtgttatttgaaaatgaaagtccattagttgcaaatgtatactgcaaactatggaattcactaataaaatttaagaaacaagtagacttactacactaatagaagcaagcaaatggaatcatatagaacgctcaattaaaaggcagaaaaatagagcaagtagaaaaaaagcacaagtacaacaaacaatatatatgaacatattaatctatgtcaattaccactttgaatgtgtatttttttttttttttgagatggagtctcgctccatcgcccaggctggagtgcagtggtgccatctcggctcactgcaagctccgcctcccgggttcacgccattctcctgcctcagcctcccgagtagctgggactacaggtgcccaccaacacgcctggctaattttttatatttttagtagagacggggtttcaccatgctagccaggatggtctcaatctcctgacctcgtgattcatctcaggaagacaagatgggtggatcacttgagcccaggagttctcaagaccagctgagcaacatggagagaccctgtctctacaaaaaataaatacaaaaattagccaggcatggtagcacacgcctgtagtcccagatgaggtgggaggattgcttgagttcgggaggcacaggttgctgtgatcacaccactgcaccccagcctgggtgccagagaccctgtctcgaaaaataaataaataaataaataaaccaaaaaacctgatttatctgaatttaatatagccgttccatacttttgagtagggctagaatggcatatatttcaccatacctttctatttaaggtatctgtgtctttctgttgaaaatggttatcttttacacattgctgggccttgtttttaattctactctgccagtgcctgtcttttttactggtgtatatagataatacacattcaggccgggcgcggcggctcatgcctgtaatcccagcactttgggaggccgaggtgggtggatcaactgagatcaagagtttgagaccagcctaaccaacatggtgaaaccctgtctctactaaaaatacaaaaattagccgggtgtggtggcatgcacctgtagtcccagctactcaggaggctgaaacaggagaccatggaatattcaccaaggcagaccacatagcataaaacataccttaacaaatttaaaaaaatcaaattccataaaatacgaaatcaaaccgtattagcattaaactagagatcaatagcagaagcatagtttaaaagcctccagaaagtaaagatttaaaccacaaacttctaaactatgcaacagacagaattctccagagatacttaaatattccaaaaattgaaaaaaacttttagcaaaatttgtagaatacagcaaaggcagtgcttagagagctatttaaataattaaatgcaaactcttgaaagtaaagatctaaaaaacaatgctgtaaattccaccccaggaaactagagaaagaagagcacgataaatgtaaattaaggagaggaaaacaacgagagaagatattaatgaaattgcaaacaggaaatcaatggaaaacatcaacaaatccaaatcctggttttctgaaatgaataaaattgataaacacccatgctaactcacaaaagggtgggcatctctaagatttccatgaacattaaaagaaccataaaggaatattaactccatgcccatagatctgataaattacaagatgaggccgggcgcggggtggctcacgcctgtaatctcagcaccttgggaggccgaggcgggcggatcacgaggtcaggagatcaagaccatcctggctaacacagtgaaaccctgtctctactaaaaaaaatacaaaaaattatccgggcgtggtggctggcacctgtagtcccagctactcgggaggctgaggcaggagaatggcgtgaacctgggaggcgcagcttgcagtgagccaagatggcgccactgcactccagcctgggcgacagagcgagactccgtctcaaaaaaaaaaaaaaagtaaatctgagatgagttacagatgtcttcaaggtgacaaatccatggaggtgcagtgctgactgaaaacagacaagtctgactcaagtatcaggtcaggttctcctatcatctgagacataccccttcccatgctgctcactgaagtgctgagtgaccgccctcccaggagacactgcactgtgtgcttttgaggttcttgtaccacatcattggggggtgggttttcctttccttagggttagtttttacccttcactatgtggcaggccagagtctcactaacacaggcttccataacaactgtttcagcactgagtggttaaatattaaaagtcgagagagccgatgcctctaaacaaaggctggaatgtaacaaaagcccaacaagagttttgcccaggcctttcctgggccttgaagcatgacaagataacgaaggaattccttttttttttttttttttttttttttggagacggagtcttgctctgggactataagtgcatgccaccatgcccagctaattttcgtatttttagtagagatggggtttcaccatattggcaaggctggccttgaattcctgacctcaggtgatccacccaaagtgctggtattacaggcgtgagccaccgcgcctggcccagaaaacagcgttttgattgaatactatgacttaagaaatgtacacaaacactcgattctaatgggtatttttccctagaagggtatggattagcaattctgaaactattttacatgttagaatatatgttgttatgttatctacaatatatgttgtagataattagtgcctgtttctcactggagttgaaaaaagtaaaagaaataaagggacactgctagaatgaacccagtggtgctagaaatacagcaccagggaaaaagaatgtttaatgttgctgtgaactgaggagatgaaatcagagtcacaaaatgcagggaaagagcttaaaaaccaagggattttaagccctcggaggagttagttgagggaagagagtggtggattagaaaccctgattcccaaacctttggaagatgcagagggataccacttgccatttaggaatgtgaactcaaaagtatctgagacatgtttcaatttagaaagtttattggctgggcgtggtggcttacgcctgtaatcccagcactttgggaggcagaggcaggtggatcacctgaggcccagagttcgagaccagcctgaccaacagggagaaaccccgtctctactaaaaatacaaaattagccaggcgtggtggtgcatgcctgtaatcccagctactcgggaggctgaggcaggagaatcacttgaacccgggaggcagaggttgtaccgagccaagatggcaccactgcactctagcctgggcaagaagagtgaaactccatctcagaaaaaaaagtttattttgccaaggttaaggacacatccatgatacagcctcaggaggtcctgaccacatgtgtccaaggtggttggggtacagcttgcttttatattaatacattttggggagacataatacatcagtcaatacatgtaagaggtacattggttctacttggaaaggagggacaacacaaagtgggcgggggaggggtctggttcccaggtcacaggtggattttcccataaatggttgtggagaccaaagtttcataatgcagatgaagcctccaggtggcaggcttcagagagaatagattgtaaatgcttcttatcagacttaagttctgtgttgatgttaatactgataggcttttcctgggttccaaaagggaggcaaatataatggggcacgtccagctgatacagtttgactgtgtccccatctaaattgcatctggtattgtaatcctttcgatttaggctattgcgccacagagcctgcttgcaggaattgtaatcctatttgtaatccccatatgttgagggagggacctgctgggaggtgattggatcatgggggtggtttcccccatgctgttctcctgatacagtgttctcacgagatctggttactggataagtgtctgggctcctcccttctctctctccctctcctcccttctctctctccctcctgccaccccgtaagacgtgccttgcttccccttctgccatgattgtaagtttcctaaggccatgtggaacagtgagtcaattaaaaactttttttaaaaataaattacccagtctcaggtagtatctttccagcagtgtgagaacagacgaatacacagaccacccttccatgatggcctgaacaagtttttcaggttaattttgtagtgccttcgccgggaggagggatctgttcaaaatgactggggggcttagaattttatatttggtttaaaaaaggaataaaggaataaagaaggaactggggaccccggaccgtagctccttccacgcatgaaccccgcacacgagtcgggattccccccatgaccctcccgtggcccccgcacaatctggagagacgcggggctgcgggcgcggagctgcccagagaggactcctgcccgggcccgcagtcgccgcgaagggacgggacaggacgcccggggtcccggctgccagcccagccccaccctgcggccgaggggaccgagggccgagctccgccagcggtactccggtccacagagcccggagtcgctggctgggaggccggggacccgccacggccagttccaaccagcccctcctcccgtctcgggatccctggcccctcacgctcaccattttccgaattcctccgtgtcccgggggcctctctgcggctcccacgaccagtgcaggtccctgtgtgacagaggctgccgcagactctccagagtgcctctcagcgacagagacaggagcccagcgaagtggcgtgtagaagacgccgcgggctttttcaatctcgcaccctcttagctgaagtgcgcctgattgacagttcccacgaccccgccccacggccctgattggatagtgcgacagatcccgccccctgacgactgagttacagaagcgatctcacgctggggagtggagactgatgaacgagttcttgacacagcccttggcagggcgggcttcttccctgcgctgtgacctgacccctcccaggggacatctgcatttaagcaggatcccccatctgtactcagtgtgaccttcctgctttttcctcctagactggggatcacaagtgtgtgcagggaaacccagacacattgtccagtggagccattccctggcctcggagtaggaggagagccgaggccatacgggccacactgcaacaagaataagggcttaggctgggcgtgatagctcatagccgtaatcctaacactttgggaggccgaggccggtgcattgcttgagcccaggagttcgagaccatcctggacaacatagtgagagcctgtctctacaaaaaaatacaaaaattagcctggaatggtggcctgtacctgtagtcctagctactcggaaggctgaggtgggaggatcacttgagcctgggaggtcaaggctgcagtgagtcaagatcgtgccactgcactccagcctgggcgacagagtgagacaccatctcaaaaaaaaaaaaaaaaaaaaaaaaaaaataagggcccgatgtgttccagggatcaggaattttggataagtctgttggctgcatggccaagcctttctcccaccttatctctcaatctactgattttcagccaaggaagtaataacatgccaacaacggaataaaatcattaaatgtatggaaaaagtggaatcacatagtagcaatattttataaggaaatcgaaagacaagaaaagcaaacactcgaactagttgagataagtagcctgctgcacccacagttcacaaacctgcagtcagaaggtgatacacgttcccaagcttgtgagtcaaactctgatgaggcaggggcacttaaagatttaactctgggaactcaacgtggcctcctactccttctccagagtgtggaaatgctccttccttcaagaccttcattttctttctttctttttctttttttttttttttttgagacggagtctctctctgtcgcccaggctggagtgtagtggcgtgatcttggctcgcaaccttcgcctcccgggttcaagcgatcctcctaccttagccacccaaggagctgggactacaggcatgtgctaccacgcccagctaatttttttttttgagacacagtctcgctctgttgcccaggctggaatgcagtggcacgatctcggctcactgcaacctccgcctcccaggctcaagcaattctcctgcctcagcctcccgagtagctgggactacaggcgcacgccgccatgtccggctaattttttgtattttagtagagacgggatttcaccgtgttgcccaggctggtcgcgaactcctgagctcaggcaatttgcccaccttggcctccgaaagtgatgagattacaggtgtgagccactgcactcggcccactaatttttatatttttagagagacgaggttttaccatgttggccaggctggtcttgaattcctgacatcgggtgatccacccacctcagcctctcaaaatgttgggattacaggtgtgaaccaccgtgccggccaagaccttcctttttgccagcaggaaactctcatctaaaaatcagtttaatgcattgacctatataaactgtcaaattcataactccttttccagaaggcaatctaatgagtctttaagtctgaccttcacagattttcctcctatatacaaatgacagcctgcctcctgtgactctgtgcatgcccaaggcaaagcacttgaatgtactgagatcttcaatatttacaaaagaagatggtcagattaaaatattctgtctatgccctcaatgagcaggtagtataacaggttagagaggacaaaatcaaataaaatggacatggaacttacccatgatatcacagtctatcctggaggatttttgtggttgttttgttttgttttggagacagggtctctgtgtcaccaaggctggagggcagtgagtggtgtgatcccagctcactgcagcctcaagctcctgggttcaagccatcctcccacctcagcctcccaaggagctggaactgcaggcgtgcaccaccagcttggctaatttaaaaaaattttttgaggtagacacggcgtggcggggggatgggggagtctcaccatgttgcccaggctggtcttgaacccctgggctcaagcaaccctcccccctcagccttccacagtgctgggaatacaggtgtgagccaccgtgcctggcgatggtttctaaaaagcactttgcttcaaaggatttagagagccacaggtgggttcatctggggccagttagactgcttgaaaaggaaagctatttatgcaatctgcagctgcctaggaaatggccccaaagttcccagagttacagtctcaaaaaggacgcaaccccctagctgcatctacatgtgggtttcccgctttccagggcactgcagcttctcagaatccacagtccttagctgttctgagcagctggaggccatccgcaagggtaggcaggatgcccagctccattctcctccctttgtaggcttaagactggtgtcagcttaaagtcactgtcctcaggctctgctgcccactccaggtttttagggctccgaaaacaatgatcctcaaaacaggtctcagaagcagaagtttttctctgaccttctcttgccctcctgtctctcagtcccattctccaccaagggtagccatagaagctagaatccctcttccccaaggcaggtcatagaatccagaacccctattccccaagggcagccataaaatgcaaacagataactttccctgtgccttcctttggaaaaactggtcacaaagaatttatctgacctaccttatttgactgtaggtcataagactgtcatttaagagaggattctggccaggtgcggtggctcacacctgtaatcccagcactttgggaggccaagacaggtggatcacgaggtcaggagatcaagaccatctggccaacatggtgaaaccccgtctctactaaaatacaaaaaattagctgggcatggtggcacgcgcctgtagtcccagctactcgggaggctgaggcaggggaatggcttgaacccaggaagcggaggttgcagtgggccgagatcgcgccactgcactccagcctggagacagagtaagactccgtctcaaaaaaaaaaaaaaaagattctgtctcatacctagaaggaaggaatgctactcagagagaccaagaaaaatctagacagacaggccttctgggtttcctcactcagtctgttagcattcaatcataccttttttgttcaatcaggtttcttcatagctgttcacacattgttaaacccaagcacaaaaatgtacaacttaccctgtatctctgagtcttcattctgaaggctcctgtgtatatacattaaataaaatgtgtatgccttttctccaattaatcagtcttttgtgagttgatttttcagtgcaacatgagagggtaaaggagaactttccccatggcccctacaaggttattcacctgcctttcactgataagttaaatgagacaaagaccctcaatcccactgtttgaataagaagccagcagactcctgggttttctcctatgtttatatataaagtagaggaagaaaattctaagatattttatatgggttaaaaaaaaaaaaaagcctggagtccgggtgcggtggctcacgcctgtaattccagtactttgggaggctgaggcgggcggatcacaaggtcaggagatcaagaccatcctggctaacacggtgaaaccccgtctctactaaaaatacaaaaaattagccgggcgtggtggcgggcgcctgtagtcccagctacttgggagactgaggcaggagaatggcgtgaacctgggaggcgcagcttgctgagatcgcgccactgcactccagcctgggcgacagagtgagactctgtctcaaacaaaacaaaacaaaaaaaccctgaaaatggttggctatggtggttcaagcctgtcatcccagcactttgggaggcagatcacttgaggctaggagttcaagactagcctggccaacatagtgaaaccttatttctactaaaaatacaaaattagccgggcatggtggcccatgtctgtagtcccagctactcgggaggctgaggcatgaggattgcttgaacccaagaggcggaggttgcagtgagccaagattgtgccactacactccagcctgggtgacagagccagactctgtctcgaaaaaaagaaaaaaaattaaaaaccacctggatataattattcctttgagaaaacaaactgttattttcctcctaacagttgtataaaacaactaatcaggctgggcacggtggctcacgcctgtaatcccagcactttgggaggccaaggtgggcagatcacttgaggtcaggagttcaagaccagtctggtcaacatggtgaaaccccatctgtactaaaaatacaaaaattagcagggtgtggtcgtgcatgcctgtaatcccagctgcttgggaggctaaggcacgagaatcacttgaacctggggaggtggaggttgtagtgagccgagattgagccactgcaccccagcctgggtgaaagagcgaggctctgtcacaaaacaaaaaaaacaaaaacacacacacgcacacgcacacactaatcaaaagtgaactctcccctttttcctctgtttcagcagctccccaaccttcacagttcatggttgtcatcacgtgctctgtacctggtaatggacatgttcagtttacccatctgaaactctcaaccccactccatcaccactgacccatccaatcatttctgcagctaaattctaagcattgtataaatacctcttccctttcagcagtccagctggcccaggttgaatccacctgtggctctctcatttccctcaatttcaattattcatttgaaactatcttccaggatcgactgtgatatcttgtatgatgaccacattccctttatttgcttctgttcttcctaacccatgtcgccacctgttcattgagggcacagacagaatattctaagctgactatcacctgctgtaaattctggagtctcagcacaacctggagaaatccacagcccagagaggatgttaatgccatccttaccacaagagggagcttcttattttcacttctggaaaatggctaaaaacagaattttggagttttacatagcacaatatagatgatagaagtaaaggtaacaccattcaattttgtttcattttctttctttttttttttctttgagacagggtctcactctattgcccaggcaggagtgcattgtcacgatcacagctcactgcagcctcaacctcctgggctccagtgatgctcctgcctcaacctccagttagctgggaccacgggtgtgtaccaccatgcctggcttattttttaaaaagttatttgtagaggtaggggtctcactatgttgcccaggtggtcttgaactctgggctcaagtggtcctcttgcctcggcctcccaaagtgttaggattacaggtgtgagccactgtggccaacctggtttcatttttatgatttaacttttcctaggttaaaaaagcaaataagtccatgcacagtggctcacctctgtaatcctagcacttcgggaggtcgaggctggaggatcacttgagccaaggagtttgagaccagcctggagcctgggcaacctagtgacaccctgtctccaccaaagaaagaaagaaagagaaagagagagagggagagcaaaaaagtctgtgaatcttaactgaatttctctgaatatgagaagtgcaaggaaatatctctacaaacggaaagatgtaggagtaactgaggtggtacaaaggattctctctgagatggtgacatttactgtgagacctgaaataatatattagggcagtaaaacgttagggcagaggattcagggaagatggcagagtagcaagcataaaaaagctttctcaggccgggcgcagtggctcacgcttgtaatcccagcactttgggagactgaggcgggcagatcatgaggtcaggagtttgagaccagcctgaccagcatggtgaaactccgtctctactaaaaatacaaaatttagctgggcatggtggcctgcacctgtaatcccagctacttgggaggctgaggcaggagaatcgcttgaacccgggtgtcagaggttgcagtgagcagagattgcaccactgcactccagccgacagagcgagactccatctaaaaacaaaagcaaaaacaaaaacaaaaacaaaaccaagctgtctcagccgggtgtggtggctcacagctataatcccagcactttgggaggctgaggtgggcagatcacccggggtcgggaattcgagaccagcctgaccaatgtggagaaacctcatctctactaaaaatacaaaattagccgggtgcggtggtgcatgcctgtaatcccagctacttgggaggctgaggcaggagaatcgcttgaacccgggaggcagaggttgcggtgagccgagatcgcaccattgcactccagcctgggcaacaagagcgaaactctgtcttaaaaaaaaaaaaaaagctgtctccccacctagacaaccactggactgacagaatcatctgatgtagcaatgttataactgtggaggctattgaagctttgcaacttccataaaaaggattagacagtaaactatggctaattgtggtcattttatcacttagcacaatacaagctatcatccccacccttacccctgttgcaggcagctgcacatggagtgttttcctctaatttggcctcgggatctctctcagaagcgtggctataaactttagtgctggccaggcggggtagctcatgcctgtaatcccagcactttgggaggccgaggcgggcggatcacaaggtcaggagatcaagaccatcctggctaacctggtgaaacccagtctctactaaaaaaaatacaaaaaattagccaggcatggtggcgggcgcctgtagtcccagctactcaggaagctgaggcaggagaatggcgtgaacccgggaggcagagcttgcagtgagccgagattgcaccactgcacaccagcctgggccactgagtgagactctgtctcaaaaaaagcaaaaacaaaaacaaacaaaaagaactttagtgctgcattgacggggctccaggacacttggttgtggatatttacagtgtgactttcatggggtctaatatttaagtgttaacccataaccaaatgtccttcacaggaaacttgattatactggcagatgcccttatggttctacctctgccaagttaatctctaccaagatagccagatacccactctctacagagccctgacctggtaataagctagacataggtgtggcagtcaggtgagacgtgtgagacagcatcaggcaggccaatatatgcactgtgggagtttcagaaggagaagagacagagaaaggtcaggggagactatttggagaaataatagctgcaaatattccaaattagataaaagccatgaatgaatgctgtcatccaagaagctcaatgaactccaggtaggatgaatgcaaagagaaggacatgaagacatattatactcaaattgtcaaagccaaacataaagggagaaccttgaaggcagcaagaaagaagtgaatcatcacatataaatgatctttcataagatcatcagcagatttctcatcagaagcgctgaaggccagaggtagtgggctgatgtattcaaggtacttaaaaaaaaatggccacggtggcacatccctgcagtcccagctattccggagtctgaagtgggaggatcagttaaggcccaagagttcaaggccagcctaggtaacatggcaagactccatctcagaaacaaagacagccaagaatccaatatctggcaacattgtctttcaaaagtgaggaggaaattaaggcatgctcacatgaacaaaaactgaggtagttttgttctttttgtttttgccattagatgtaccctgtgagaaacgcaaaagccttctacaggttgaaatagaacactggacaatatctggaaggcgtaagcccaaataaagatctcagtagaaacaaatgcatggacaattataaatgctaatattattgtacaataattgtgaactccagtttttgtctttacataattgaagatacaaatccattaaaaattattagtctaaaagctagcattttagacttggcttttgaactctatattttgtttttttacacagtttaagagactaataaaaaagaaactaggttgggcgtggtggctcacgcctgcaatcccaacactttgggaggctgaggcaggcagatcacgaggtcaagagattgagtccatccttaccaacatggagaaatcccatctctactaaaaaaagaaatacaaaaattagttgggcgtggtggcgcacgcctgtaatctcagttacttgggaggctgaggcagtagaatcacttgaacccaggaggcggaggttgcagtgagccgagattgcaccactgcactgcagcctggagacagagagagactccgtctcaaaaaaaaaaaaaaagaaagaaagaaacgaatgcaccgaaaatatgtttgcgtttttgaatacataaagtataaagatgtaaatttatgacaccaaactgaaaggggtgtgaacaggcatgccatggagcattgtatttgcatgctatttatgttaaattggcataaatttagaatgttatggccttaggatggtaaacgcaatccccatggtaattaacagagcagtagtgtatacacaaaaggaaacaataaagaaatttaaatgtttcactacaaaaagcaattaaaagcaaaataatgcagaaatgcatgaaatgagaagaaaaaagctacaaggcatattgaaaacaaataggaaaatgacaaaaccaagtcctttcttatcaggaattactttatctatttattcattttgagacacagtgttgctctgtcgtccaggctggagtgcagtggtacgatctcggctcactgcaacctctgcctcctaggttcaagtgattctcatacctccaaagtagctgggattacaggcatgcaattctcctgcctcagcctcccaagtagctgggattacaggcatgcgtcaccacacccggctaatttatttctatttttagtagagacagggtttcactgtgttggccaggctggtctggaactcctggcctcaagggatctgctcacttcggcttccccaagtgctgggattacaggcgtgagccgcagcgcctggcaatgtgagttaattttagtgtataatgtgagaaaggttctcagttcatctttctgcaggtcaatatcccattttcccagcacattgttgaaaacccattccctatgaaagcatcttggcccatttgttgaaaatcaatgagccataaacaaagagtgtcttagtccatttgtgctgctatcgtggaataccacagactgggtaatttataaagaatagaaattgactttctcacagttcagaaggcttagaaatccaagaagacactggcatctggcttcagcattgctgcattctcacagggtggaagacaggagggcaagagagggcaaattgcattcatcaaaccctgtataatgccattaatctattcacgagggcagagtcctcatgatctaatcaccaaaaggcccctcctcccaatagtgttgcagtgggaattaagttctgacttataaattttagagagtacacaaatatttaaaccatagctaagggactctcaattctgccctgctggtctatatagctgacaatttgccagtaagtctggttactttactacccaccctgatgctgaagcatcccattccgtcccacatgatagtcatgcaggcatagaaatggttctaaagccgcaagagcatcccttagacaacctagatgtacttctattttaggatacatcctgtaaaagaaattttctgaagaacataataatgggtcatgccatggttgctccacatgaaacgctcggggcactgtcttcactcactgtaaaatcagcccaaggactgaactcatagctcttaggaaagcttgcacattggcaaacaagaaaactgacacagagagtaagcttccacacccacaatctcagctactcaggaggctgaggcaaggggattcttgaggccaggagtttgaggccagtttgaaccacacagccagattccacctcaaaaagaaaaaagaaaaagaaaacggctacaatttacacggataccagatacgctttgggagtctttcatgcagtggacacagtctcaaaacctggaggatttacaacttgttctggttacttattacctatcatctattaccaatggacatgtaatacatgcactattacaggctattcatctccctcccaaagtggctactgttcactgttcagtccatattaaggagacttatcctatgtctttcaggaatgatagggcttaaatactgttaaatagaaagacagacatgtacccctttatcctttctccccccaatttataagcctgccttttttttttttttttttttgaggtggggtcttgctctgtcacccaggctgcagggcagtggcatgatcacagctcagtgcagcctcaaccttccaggctcaagtgatcctccaacttcagcctccaaagtagctgagatcacagacatgtgccaccatgcccaaataatttacttttttatttttatttatttatttatttatttttatttttattttttttgagacagagtctcgctctgtcgcccaggctggagtgcagtggcgcgatctcggctcactacaagctccgcctcccgggttcacgccattctcctgcctcagcctccagagtagctgggactacaggcgcccaccaccacgcctggctaattgtttgtatttttagtagagatggggtttcaccgtgttagccagtatggtctcgatctcctgacctcgtgatctgcccaccttggcctcccaaagtgctgggattacaggcgtgagccaccgcggccggccatttttttattttttgtaaaggctgtctttaactctggttgatattactatcaggtaaatgtcccataatctgaaggagaccaatagatacaaaagagagacaaacaattgttggagagattatatatgcctcatgattagtaattatagtaacttgttaacaattgtcattgttaatgaaaatcagattataccaaacatactccttgtagcccctttctctctctcttttttttttttttcttttttttgagatagagtttcactcttattgcctgggctggagtgcaatggcacgatctcagctcattgcaacctccgcctcctgggttcaagcaattctcctgcctcagcctcccaagtagctgggattacaggcatgcgccaccacgcccggttaattttttgtattttttagtggagacagtgtttctccatgttggtcaggtggtctcaaaccccctacctcaggtgatccacccgcctcggcctcccaaagtgctaggattacaggtgtgagccaccatgcccgaccagcccctttcttttgatattttgctttgcactaatctcctaccagctgggacatttacagagataggaaatagttaagaaaattaaaaaaagaaaaaaaaagaaaaaaaagaaaagaaaactggctgtgccctggcatttacaaaatttctgacccaattatttctcacaacactacttacttgtaaatctcacacaacactgcttacttgtaaatctcacacaatttcattcccatgtatatattcaagagaattgagggcagggactcacacagacacatgtattctaattctatagcagccttattcacagtagtcaaaatgtgattgtggaaacccacatgtttatcaacatataaatggatgagaacagtgtgttttaactatacaatggaaaattattcaagcactaaacaagaatttctgatatgtgccaccacatggatggatcttggaaatattatgctaagtgaaattagccagatatagaagcacaaatactgtatgctttcacttatatgaggtgcctagcatagtcaaattcacacagagagaaaatagaatagagattatcaggacctgggggtgggagagaatagggaattatgtgtatgtatatgggatgctaagtagaaatagcaagtggtatggtaacatgtatagtataatcccatccagtatgtattttagtttgtaccagcattgaagaagggtcttccagatggacagtcccagtggttacacttgccataggcaacaatgcccctgggccacatcttggaagtctatttgaattacatttcaatgcaatttattcttatgaatactctaatgaaacagctcttatcaaggcacccagtgaccaaacacttgtcaaaatctacgtcaaccctgtttccttgtcttattcaaactctcagttacctgtgacagagttggccactctctcatctttagatactttcttctggaggcttccaggagaggacatccacctgttactcctcctgcctcaccagcctgcccagtctcttccaggctcttcctcctgctaacctcaggggttgccagcacttggactcctcttgagcactcaatttttaaatttattttttatttttatttttgagatggagtctcgctctgttgcccaggttgaagtgcagtggcactatctcggctcactgcaacctccacttcctgggttcaagcaattctcctgcctcaccctcccaagtagctgggactacaggcaaacgccaccaaagccggctaatttttgtatttttattagagatggggtttcaccatattggccaggctggtctcgaactcctgacctcatgatctgcctgcctcggcctcccaaagtgctgggattacaagcgtgagccactgcacctggctgagcagtcattttctgttataattcgctcctaactctgaaaccagttggcctgttctggacccggggcttcaaataacttccgcatgataatattctcaacattccatccagatctcccttgcaagctccagactcccaggtccagtggcctgctgaaaaatcttcccttgtttggctcaaatatgtcatggctgaacatgaaacgtaacccttgacttcccctcctgtcaactcccctgagccttgttcctctgagtaagaggcagcacccaggagctctgaacagtaggacacatccttgactcttctctcttttcacatcatcagaagttctacaggagctacctctgcctggttcactcccactcaggtttcaggttttaatttgagcatcagtccccacaccagggaagcctccactaacctctcagactcgtttgggaaccccctccatcatcatatgctctcagatccacacacccttctgtactgcactgaacactatcagcaccggtcctttatgtttatgtccagactccactaaatagtgggaatggtagggcctttctctaccatcccacccagctccaaaaacactgctcaggttcatatctagatttcgaaatacacaaccttctgttaacatccactaacactagccaagtccaggccagcacgacctatcttgcaactactactgtggttttcaaactggtcttccagctcccctctagcatctttttttcccaaccaagagaaggagtaaacttcttcaaacactaatgaaaactgctgctttgctcaaaatccagtaactgtctataacatggcgacaagatcccatgtgatctggcccctgcctacctattgaagcccatctattattaccttggcactctagctgtggtccaaggatcaacaacacagatgacacctggaagcaagttaggaaggcagactttctttcatttttgagacagagtttcgttcttgttgcccaagctggagtgcaatggcaagatctcggctcactgcaacctccacttcccgggttcaagtgattctcctgtctcagcctcccgagtagctgggattacaggcgtgcaccaccatgcccggctaattttttgtatttttagtagagattgggtttcaccatgttggccaggctggtctcgaactcctgacctcaggcaatccacctgcctcggcctcccaaagtgctgggattacaggcgtgagccactgcgcccggccaggaatgcagactttcatgccctactcttaatctgctgagtcagaagctgaatttgaagatccatatttcctgtgaaagtttgagaagtacatctcataagcttccccctccacctgattcagccctaagggtattgcatattcctcaccactgaggtatttgaatcaacaaaatgtcttaggtggcgtagacccaggagggctgcaaaatgcttgggcttgaactgggagaggacactagagagacagtcccaagaagaccatgcggccacggccgagcctgcctttccagcactgccatggcatgtcccactgctcctgaagtacaggaatggccactcatgggaactgaccgggagtgactgtgtgcgcagtcagcaacacactgaggctggagtgcttgtagcaggatgagccgcagacgaaacccctcagacatcacgttaaagaaggaagggctttattcagccaggagcatcggcaagactcacatcttaaaaaccgaactccccgagtgagcaattcctgtccctcttaagggctcacaactctaagggggtccgcatgagagggtcgtgattgattgagcaaacagggagtacgtgactaggtgctgcatgcactggcaattagaacagaacagaacaggacagggattttcacagtgcttttctcttcaatgtctgtaatctacagataacataaccgattaggtcaggggtagatctttaactaccaggcctagggtgaggcgccgggctgtctgcctgcggatttcatttctgccttttagtttttacttcttctttctttggaggcagaaatcgggcataagacaatatgaaggggtgtctcctcccttctgctcacacactgaggctggagtgctcgcaccctgctacccatgtgctcaccctgggattcggggaagcatgcacacaggcaagcaggaaaaacacgaggatcctggaaggggatgggcagaacgtgatggaggagagaggtttctgcttcctccaagggccaaaagtcactgtctgacatgtgaacgagatactctaacagagttcggggttggggtaggggcagatacccagtacctgctacaaaaggccagtagtaaagtcacaacaaataccaaaatgtcatgtttcaaaggctctttagataagcatcgattttaaaaccatataagaattaaacttgttgccaggcagcatgactcatgcctgcaatcacaacactttgggaaaccgaggcgggaagatggctcgaggccaggagttcaagaccagcctgagcaagatagcaagacctcatttctccaaaaaaaaaaaaaaaaaaaaaaaaaaattagctgagtttggtaccatgcaccagtagtcttaactacttgggagactgaggcaggaggatgtcatgagcccaggtgctcaaagctgctgtgagctatgattacaccactgcattccagcctggataacagaataagatgcgatctctaaaaattaaaaaaaaaagaattaaatctacttgtctattacacataaacttcaagcaactcaaggatccaagagaatacaaaattgaaagaaaaattttatcaactgactttaccaaaacaaacccaccacctattcaacttatgaaagctctttttaaaatcaacttttattttagattcagggagtacacatgcaggtttgttacttgggtattttgcatgatgctgaggtttaaagtatgattgattccatcacccaggtagcgagcatagttcccaacaggtggtttttcaacctttcacctccctccctcccccgtctactagtccccagtatgtattgttcccatctttatgtccatgtttactcaatgtttaactcccccctttttttttttttgagatggagtctcgccctgtcacccaggctggagtgcaatggcacgatcttggctcactgcaacctccacttcctgggttcaaatgattctcctgcctcagcctcccgagtagcttggattacaggcacctgccaccacgcccagctaatttttgtatttttagtagagacagggtttcaccatgttggccaggttggtcttgaactcctgacctcgtgatccacctgcttcggcctcccaaagtgctgggattacaggcgtgagccactgcacccagctgtttaactcccatttctaagtgagaatatgtggtatttggctttctgttcctgtgttaatttgtttagggtaacagcctccagctgcatccatgttgcatcaaacgacatgattttattctttttttttttttttttgagacagagtcttgctctgttgcccaggctggagggcagtggcacaatctcggctcactgtaacttccaccaggttcaagcaattctcctgcctcagcttctcgagtagctgggaccacaggcatgcaccaccacagtcggctaatttttgtatttttactagagacggggtttcaccatgttggccaggctagtctcgaactcctgacctcaggtgatccacgcctcccaaaatgctgggattataggtgtgagccattgcccctggctgatttttttttttttttatggttgtgatgaacctttgtgtaaagaaaatttacaaagatatctcacattaattttttaatataagacttaggaatccagagtgaagatctattttgtcaatgagccactgataaagacaatatttatgtattttataacatttctttgatgtggcaaattttctggaacattatacatgagtaaatttggttaagaatttcctgaattacttacgtacatttacctccagtcgtgtgaggatgaggagccttcaagccaacaaagttgtagacctatatccatggaagtgacgagcaggtcatttcatcaggaaactctcacacttgtcagcagatagatgctgcacatggaattagttctattcctcagaaatttatatatatttgtaagaaatgtgatttaaattcaatactatatagtttatgttattgtgtacacagcatatgtttactccataagcaggaccttgactccattatcaggtttaatacttttccaggtgttttgtttttagtttcctgggcaaatagtgctatcatctccaatcacgatacttgcttcttccatctggttcttcatagtgatcttttttttttgtttttgtttggagactgagtctcgcactgtcacccaggctggagtgcagtggtgcaatctcagctcactgcaaactctgcctcccgggttcaagcgattctcccacttcagcctcccaagtagctgggattataagcggccgccaccatgcctggctaatttctgtatttttaggagatatggggttgcaccatgttggccaggctggtcttgaactcctgacctcaggtgatctgcccgccccggcctgccaacataatgatcattttttgacagtaagtactatagactaccgtaataataagtggggttaaacagacatatttgctttcattagattctgttcctcctttcactgggaagcctctcacctaccggttcctcatcgtgctgtgctctgaaacataccttaatgaagaatctgatatccaaaaaattcatcttcaaaatggaagacaaaagaaaaactatcccaggcttaaaatatatatattgagagaatgtgttcctactacaccagacctacaagaaagatcaaaggagggtcttcaatttgaaattaaaaaaagtcaaaatccacagggaaaaacaaagagcaccattagagattatgtaagtgggaacgacaaatggtatgtgtatttcttcatctttcttctcgttatagatttaaaaggcaactgtgtaaaataataagtagtcaatggattgttgggcctacaacatagaagaatgtaacatgtgcattatatttacaaatgaaaccataaaaaagtgagctaactaaatgactaccaaagcaaagtagaaagaatgtattgttggatgtgtaaacctaaggattgttacacatgcaacaaaataccccagaaaggcaaaaaatataatagggctttagaggataaatatgtttgtatatcactggaatttatccatagatcactggaaaattgaccctgattgggataagttatttacatgataaacacttgagtaaacactacagaacctcaagtcatcctacattgtaaagacgtattggatgaaagcagaatttactgtccttcctaaattaaaaatggacactacatacattctataacattatgaggacaagatttccctcattcatccaacttggaagtttccatgttatattacatatttccccttcaacattcactctacaattagaatcagaaaattgtttcttgtgcaggtcgtgatctctctatatccatttcttgaacttctagcccaggtacagaattacatttcaacgatcccttattttgcattatatgttctcaaaaaattttttttttttgagacagagtctcgctctgtcacccaggctggagtgcagtggcgcaatctcggctcactgcaagctccgccttctgggatcacgccattctcctgcctcagcctcccgagtagctgggactacaggcgcctgccaccacgcccagctaattttttgtatttttagtagagacggggtttcaccgtgttcgccagggtggtcttgatctcctgaccttgtgatccacccccctcggcctcccaaagtgctgggattacaggcgtgagccaccaggcccggcctccctgactttttttatggtgcaaaaatacacataaaataaaatttaccctctttttttttttttttgagaaggggtctcactctgtcaccaagttggagtgcagtggcacgatctctgttcactgcaatctctgcctcctgggttcaagcaattctcctgcctcagcctccccagtagctgggactataggcgtgcgccaccacacccagctaatttttgtatttttagtatagatggggtttcaccatgttggccaggatggtctcgatctcctgaccttgtgatccccctgcctcggcctcccaaaagttctgagattacaggcatgagccactgtgcctggacaaaatttaccctcttaaccctattcatgagggccctaccctcatggtctcatttcatcctaatgtcctcccagagatcccatctcctcattccatacattagagagtagtctttcaacgtatgaatttcaggggacaaataaactcaataatattgtaatctccaccccaatgtatttcctcacatgcaaaatacatttattccatcccaacaccatcaaaagtcttgactcattctatcattaactctgaagcctaaaatcaaagtctcatttaaatagcatctgaatcagataagggtgagagtcaatgtaacattcatgctgagccaacattcttctccagatgtaaaatcaaatcagttgtgtacttttaaattataatggtggaacagttataagataaacaatgctattccgaaggggagccatataaggggtggaagagtgacagttcccaagcaagtccaaaacctggaaaggtaaacttcatgagatttttttttttttttttgagatggagtttcgctcttgttgccaaggctagagtgtaatggcgcgatctcagctcactgcaacctctgcctgccgggttcaagcgattctcctgcctcagacccctgagtagcttggattacagccatgtgccaccacgcctggctaattttgtatttttagtagagatggggtttctccatgttagtcaggctggtctcgaactcccaacctcaggtaatccgcccgcctcggcctcccaaagtgctgggattacaagtgtgagccactgcgcccggccaggatcttaaggctaaataataatcccttttcattcaatactctgccctcaaggaattgtgacacagcaattgtgtcccagcatctctgttagacatggatcaaacccaaatagcgtttgatggcactgcatccacacttctgggtttagctcatcttgtttgtggaaactccaaaatgtcccctactgttgatgctcaggaggcagccttcatgacctctaaacagctactgggatccttcttctcttgtctctaagaataccatgcattcagctctatggatggttcctgtaaaatcatacaggtccaacaactttcattttttcctgtgaccttcactttcagttcaaaggggctattttactgctgaggtggctaagtccatggttaacaagaataccactcttcctatcaaaaggtcttggacacacccttggtgctgtcttcccagcatgccttttcatctttgcgataattgttttctaaacattttcatttcaatttctcaatttcttcttgcttaataattccatctccaacatttttctctactcacattttatttatttatttattgagacagaatctcactctgtcgcccaggctggagtgcactgttgcgatctcggctcactgcaacctctgccacttgagttcaagcgattctcctgccttagcctcccgagcagctgggattacaggcatgtgacaccacatctggctaatttttgtatttttagcagagacagggttttaccatgttggtcaggctggactcgaactcctaacctcaagtggtctgcctgcctcagcctcccaaagtgctgggattacaggtgtgagccaccgcgcccggcctctcctcacatttagtatatgcagtcaagaggatccaagttgttttttttttcctttttttttttttttgagacagagtctggctttgtcacccaggctggagtgcagtggcgcaatctcggctcactgcaagctccacctcctgggttctcaccattctcctgcctcagcctcccgagtagctgggactacaggcgcccgccaccatgcccggctattttttttgtatttttagtagagacggggtttcactgtgttagccaggatggtctcaatctcctgacctcgtgatccacctgcctcggcctcccaaagtgctgggattacaggcgtgaacccaccacgcccggcccaggttgtttttttcaacacttctaagaaatattgtcagctcaatatcaagtttcatcacttcctagttctagtttccccaaaacagtagcaccggagtacaatgcaccaagttctttgccactttctgcaacggttcatcttttctctattatgcagtaatattgtcctcaattctgagacctcattagtattgcctttattgtccatatatccaccaaaattttgtacatgattttttatgtgccctagtaagatggaagctttctctattcctctttttattttatttttttagagaaggggtcttgccacactgcctaggctggtcttgaactgctaggctcaagcgatcctcctgcctcaccctcccaaagttctggcattataggcatgaaccaccataccccgcctgcctgtcctcttttgtgagctcttaccagcgtccaaagacaaaattacaacaaatttaggtactggcagatttagtgtctgatgagggcctgttttctgattcacagacagctgtcttttttgtttattttttgaggcagagtctcactctgtcacccaggctgcagtgcagtggtgtgatcacggctcactgcagcctcggcttccctgggcttgggtgatcctcccacctcagcctcttaagtagctggaactacaggcgtgtgccaccatgcccagctcatttttgtattttttgtagaaatggggctttatcatgttgcccaggctggtcttgaactcctgggctcaagtgatctgcccacctcagcctcccagagtgctgggattacaggcatgaaccaccaggcctagcctcatagataactatcttaatgtatcctccaaggcagagagcaaaaaagcaagctgctgggcggactcacaataggtaaccaatttcattattgaggctccactctcatggtctaatccaatctgtattatattccaaagaagacgttccctaatctgtcacgttagggaaatggattagaatgagtggattttatgaagacatttattccctaacaggtggtatgctttttgttgttgactttttagagttctctaagcagtctgcatattaatttcttgtcagatacatgatttggaaatactttctctcattctatgggttgtctattttgatgccgaaagtttaaaaattccatatatttccatttattctcttatgggtcatgcctttggtgtcatatctaggaaatcattggaaaatccaggttcataaagcttttgccttatactttttttttttttttttgagacggagtctcactctgtcaccaggctggagtgcagtggcgcgatctcagctcactgcaacctctgcctcctgggttcaagtgattgtcctgcctcagcctcctgagtagtgggattacaggcatgagctaccatgcccggctaattttgtatttttaatggagacggggtttctccatgttggtcaggctggtttcaaactcttgaactcaggtgatctgccagccttggcctcccaaagtgctgggattacaggcgtgagccaccgtgcctggacagggaagggtacattttcattctgttgcatatggatgtgcatttttccccagcatcattctatggaaatactgtcctatcctccattgtatcgtcatagtacgcttgtcaaaaattgttggactcactatgcaaacgtgtatttctgtgctgtctattttgtcacaatggtctatttctttgtcagtatgctgatattaaatttttttattagtataaatttgctctaagttttgaaatcaggaagtgtcaatctaccaactttgctcttgtttttcaattttattttttatttatttatttttttgagacggagtctcgctctgtcgcccaggttggaatgcagtggcgcgatcttggctcactgcaagctccacctcccaggttcaagccattctcctggctcagcctcccgcccgagtagctgggactacaggtgcccgccactgtgcccggctaattttttgtatttttagtagagacggggtttcaccgtgttagccaggatggtctggatctcctgaactcgtgatccgcccgcctcggcctcccaaagtgctgggattacaggcgtgagccactgcacccgacgtttttcaattcttgttttgtatattcagagtcccttaagatgccatatgtaaaacaatggaaaaatgggtcctaaaaactaatcaagtggtcaaagctatccctaaaaggctagcagggagcaaaaagtgctatttctcaatgagaaaataaaaatcttagagagatgttttgaaaaatgccatgtcacttttgaaagtgggccacatggtaagaacaaactaagcattcacacactaaagcagaaagaagctgaaattcttggaagtcttagagctgcctctacaatgggaaaaatgacccctctgcttcatgataaactgagtaaaaagactgagaaagcattaagtatgtggctagaggacacatcgctgaacaacatctcttttgataataaaataaagtgggaaaaaacagcctctataaataccactgtgagaaggctgaggagagcaaggaaaaggagtttcaggccagtattgtctggctgggctagctacataaagcgccagagcctcaaaaatttaaagaccacaggagaattgacactggcttatgccaaggcaatattagcattcccagcagagctcacaaaactcataaaaaggaagtctaccttccagagcaagtcctccattccaatgaattgggcaagccctagaaaaagaaagcggtccagtggtacctacatccatgactgccaaggaggccctggggctcagggcctggaaagatcacctactctggtgcagtgtggcaatgtggcaggtcacaagaacaagccaggccttggctactgagcaaacaatccctaggtcctttagaaccaaagcaaaacttgcctgcctcctttctggcaaaaatataagaaggcttgggtgatgatcatcttgtccttggaatggttctaccaaggcttcattcctgatgtgaagaaatatcttgaagagaaggggctgccactcaaggtccttctcataattgacaatgttcctggccatctccaatctctctactttgccacaaagaatgtggaagtgatgtccctgctgcctaacactacatcacagtgaaagctactcaatcaaggcataatcaagtagatcctgaccttcgggaggattcatgccatcctgatgctaactctgactgtaccatagtggatttatgaaagcacttcacaattgcacatgcaactgtccttattgcagaggctatagatgtcccagagctcaagaaactcaaagcatgctggaagccattatggagtgagggagtcaataattttaggggcttccccactattgatgcagtagttaggaatatcttaaatactgcaaggggagttggtaagaaaggctatctctgacaggattgaagacgatgttgagtaacacacagaagggcataaattcttacaacaaggaactcaaagatctgctcaaatgctctatagattgatgatgataatgatgacttaaaaaaggtagtgccacagatttggacacttgaaaaatttgcagtagttttttttattttttttgagacggagtctcgctctgtctcccaggttggagtgcagtggcgccatctcggctcactgcaagctccgcctcctgggttcacaccattctcctgcctcagcctcctgagtagctgggactacaggcgcctgccaccatgcccagctatttttttgtatttttagtagagacagggtttcactgtgttagccaggatggtctcaatctcctgacctcgtgatccacctgtctcagcctcccaaagtgctgggaatataggtgtgagccacctcgcctgacctgcagcagtttttcaataggcaaaactgttaagaaagttcatcatcctcaagtaagatccttcgatggaacaaagcctccatgtcacccatggaataacatgccaacaaacagtgcaagatttttttgatgactcaaaaaaaaagaaaaaaagaaaaactagcttcctacacttctcactaagcacctgcaaatataaacacagagccttccatggttaaggatctgcagccctgaagctgaacagatcttgacattagtattatttggcctcctccaacaagtcaacatctgcatcagaacctagttctttgaacactgatgatcatcctgatattctgtcaaggttcaagttagcctgatgtctcctgcttgtctataatgctacaacacatgacaatgttaggcaccatccagcaatcatcatcatcatcattatacttgggttatcaagagagaagcaggattttgataagtgttgacatgctcattcaggtcacaaaacaaaagcaatctgtgaatgttaaaacaaattttaatgttctgggtgacatataccacgtaggtgggcctgcaatggttgtgtctgcatcgaacatgtagagactatttttcttgtcatgattctctaaacaatacaatcaaacaactatttacatagcttttacaatgcatgaggtattaaaagtcatctagagatgatttacacagtatactggaagatatgcataggttacatgcaaatatgccatataacaaaggacttggcatctgtggatttagagggtgctggaaccaatcccctgcaatatattgggggataactgtatttaaaaaaattgaaactacttaaggctttatcccatgtttacattcatagggtctatctccaaagtgagttctttcaagtttctgaaattaaagtactgaatgttttcccacattccatacatttagagagtatctttccagtgagtccttttatgtctatgcaaggaacggagagaactcaatgctttcccacattccttacattcatacagcttctctccagtgtgagttttttcatgtcctcgaaggaaacgggaacgagtgaaggctttaccacattgtagacattcatagggtttctctccagtgtgaattctttcatgtcgtagaaggcaagtgagccaagagaatgcttttccacattccttacattcatatggcttctctccagagtgaatcctttcatggacttttaagttactgaaatgactgaaggcttttctacatgttttacactcataaggtttttctactgtgtgggtccttttatgttgagaaaggtatttgaaacaactgaatgctttcccacattccttacactcatatggcttctctccagtgtgagttgtctcatgattttgaaaggaagagagatcactaaaggctttcccacactgacatttatagggtttcactccagtgtgagttgcttcatgtcttcgaagggaaccggcaagactgaaggctttaccacattgtttacattgatagggtttctctccagtgtgagtcctttcatgtctttgaaataaactgggacaaccaaaggctttcccacatatcttgcatttctggggtccatctcctgtgtgtgttatcatgtgacttcgaaagctcgagctatgagataacactttcccacactgcttacattcatagggtttctctccagtgtgagtagtttcatgatttcgaactgaactaggacaatcaaagcctttcccacatatcttacatttatgtggtccgtctccagtgtgccttatcatgtgtcttcgaaagcttgtgtgatgataaaacgttttcccacattgcttacatgcatagggttgttctcccgtgtgagtcctttcatgtagtcgagtgtaatagtaacagctgaaggctttcccacattgtgtacatttatagggtttctctccggtgtgagttctctcatgtcttagataggtactgtaatcaggaaaggctttggaacactgcttacattcatacgctttctctcccgtgtggattctttcatgtcttagataggaactgtaaaaaggaaaggctttagaacactgcttacattcatacggtttctctccagtgtgtgttctttcgtgcaaatgaaataaactgggccaaacaaaggctttcccacacaacttacatttataaggtccatctccatggtgtgccgccatgtgtcttcggaggtttccaagagaactaaaggtttttgcacattctttacaatcgaagggtttctttccggtggggggcctttcatgtgtctggaaggagtgctgatgactgatggctttcccacgttgtttatgtgtatatggcttctctccatattcctgatgctcacatgatttgtgtccagtgtcaactctgatgttgcaattaagagacgaatgacccaagacgacttctccacactcaccactgtcacatggatttactcgaggagtgttcttgttcacaatactatctggaatctggccaaaagtttctccacattgactgtcatctttaatttcacatgtatgacttctgtaacaaataagaaatatattactaaaggtttgtttataagtgattttctatatattgaagtactagatttatatttgtaacattatcatgcaaagtacaggcttcatcccctgtttgaatgtgaagtgacagtgctgtgtaagatggtcccatcacagctattagcaaaacagtgatattcacatggagattctttctttctttctttcttttttttgagacggagcttcactcttgttgcccaggttggagtgcaatggcacagtctcggctcactgcaacctctgcctctcggattcaagcaattcttctgcctcagcctcccaagtagctgggattacaggcatgcgccaccacgccctgctaattttgtatttttagtagagacagggtttctccatgttggccaggctggtcttgaactcccgacctcaggtgatccacccgccttggcctcctaaagtgctgggattacaggcgtgagccaccgctcctggcccacatggagattcttaataccatttccaagggaactattttgcaaagactgaatagctatgtcacatttaactatatgttcctcgggaaaatttttttttatagagatggggatctcactatgttgcccaggctgatctcaaactcctaggctcaagtaatcctcccaccttggcctcccaaagtgctgggattacatgtgcgagtcactgtgcttggtcagaaaaagaattattggaatgaataaatttaagctgggcttgttcattttctctgctcgtttttaaaattttcttatcattctatgaaccactgcagggacatagctttcttttgtgggtgcaaattaccttagatttctcttggcattttggcactgatctccaatgttctggtcctcccatttcatttctaaaaggtagacccaggaaaatcactaaaaatgtttacaaaattatagaaaaactctaagattttacgcgtactgcaatcatgcatgattcattcaccaaagtacatgtgactcttcaacaacacaggtttgaactgcacagctccactcatacatgaatgttcttcagtctctgctacccctgggacagcaagaccaacccctccccttcctcagcccactcagtgtgaagacaacaagggtgaaaacctttatgaagatctacttccacttaatgaatagtaaatatagtttctcatctttttttttttttttttttttgagacagagtcccgctctgtcgcccaggctggagtgcagtggcgcgatctcagctcactgcaaactctgcctcccaggttcacgtcattctcctgcctcagcctcccgagtagctggggctacaggtgtccgccatcacgcccggctaattttttttgtgtttttagtagagacggggtttcaccatgttagccaggatggtctcgatctcctgacctcatgatcttcccgcctcggcctcccaaagtgctgggattacaggtgtgagtcaccgcacccggccagtttctcttcttatgattctcatcaacattttccttcccaagcccactttactgtgacagtacagtatgtaatacatatgacatacaatatatggattaatctaatgtttatgttatccataagtgggccagtcaacaataggttattagtggttaagttgcgggggacaaaaaaagttattagaggatgtaagactgtttgaggggctgacacctctaaaccctgtgttgttcaagggtcaaccatatcctctttccatatttcaaatcatgaacagcgttgatggccaggaaacaaatgtctctaattgactaagtgaagagatgatgtcatccttacctatacagtccaggttcctaatggtttcctgcatgacatttctgtagagactcttctgtgatggacccagcaaagcccactcctcttgtgtgaagttcacagccacatcttcaaaggccactgagtcctgaaacatcccacatgtgcagaggaggaaggttgagatggacagcactgagaatccatactcactgcataaactttgcatgatgctgtggtttccaagcatttattcgatgacatagtaaacccactcttattttgtctacactcactttttcccacaaagccattgtgatgctttagttgaatgtgtttggtaaagtaacagtcgaataggaacctgcctcttgttggtgagttaagtgagtgagtcttattgcctgcgtcacccctgatgtctatttctacagcggtctgtgtagttcttatcatgacaaagtacaactacctattgtgtagaagagttaccactcccagtcctgaaactgcatatcctgacaaatgctcatttgcaaacttggatctttcatggtgtctaggcaccggatcccactaatgtaactaataacagaggctgagtgtgcctaaactgtttatgcaaaatataggggccaggcatggtgacttaggcctgcaatcccatcactttgcagggccaaagtggaaggatcacttaagaacaggagtttaggaccagcatgggcaacatagtgagcccttttctcaacaaaaaataaaactaggtctgactcagtggctcatgcctataatcccagcactttggaaggccaagacaggtggatcacttaagcccaggagtttgagaccagcctgggaaacatggtgagaccttgtctctataaaaaatacaaaaaaaaaaaaaaaaaaaaatagcaagatgtggtggcgcatgcctgtagtcccagctacccaggatgctgaggtgagaggatcacccaagcgcaggaggttggggctgcagtgagccgtgatcatgccgctgtactccctccagcctaagcaacagaatgagatcctgtctcaaaaaatataataaaagtaaaaaacaaaaaataaaaaatacatatatatatatatatatataaatttttttttaacttaactcctattccccctctgagagtttggaagtttgttacatgatcagcagagagagaatacctgttagccacagcacaagttagaatgcttgtgctctccaaaactcatgctgaaacttcatcctcaatatgacaataatgaaatgtggggctttaagacttgattggatcttgaggtactaatccattcatagattaatggcttaatgaataaatggggtatctcaggagtaggcctagtgtccttaagagacgaggaagagacctgaattaacactgggcccctggccatgcgataccctgtgccacctagggactctgcagagtccccaccagcaaggaggctcttaccagatgctaagccttgaccttgggcttctcagtctccagaagtataaaaaaataatgtttgtttgtttttataaattacccaggctcaggtaatcctgttataagtaacaaaaaccagactaagacagttatgaagaaacactctggacactggatcactactgacggaccctagtagctaacgtttcacgtgtttggttgcaacttgttacatgggatatttagcccatcctatgcaattacactaagagagaacatttggaaactggcaactggtttccattagaccaaatgtagttaagcgtgacaaaagactaataaaaaatatctcactatctcaatggaaaaattacacatttttcattggataatgacaaaggaggaggaaagacagggaaagattgcacatgttctaacaaaaaactcagtgtcacctctcatgattatctataatatttcctaaattcctaaagagacttttagcagtcaacaaagattatattaccaaatctaataaaagtcacaaatatctgaaaaggttaaaaacctaaccggcagggtgtggtggctcacgactgtaatcccagcacttcgggaggcctaggggggcggatcaaaaggtcaggagatcgagaccatcctggccaacatggtgaaaccccgtctctactaaaaatacaaaaaaaattagctgggtgtggtggcgcacctgtcatcccagctactcaggaggctgaggcaggagaatcgcttgaacctgggaggcggatactgcaatgagccaagatcatgccactgcactccagcctggagacagagtgagactccatctcaaaacaaacaaacaaacaaaaaacaataacaacaaaaaaagaaaccgcccaaaaaaaccttctaaccaagaaagttacagctttccaaaaacagataaaggatttttaaactataatattcggcatcctatactattaacagggagataaacaaacagaaaaaggaaagcaaaaaatggttgaaaagctttgtggagtttttatttgcccttgtcccaatccctcctcacatcagagcccgtcttgaagacagcagaccaagttttcaatgtggatccctagagacagcagatcaggtcttacttgcaaattattgcctttgtattttccagttggtacaaggactatccaaaggtctgaaacaggctctcttttctttctttcttttttttttttgagacgggagtctcgctctgtagcccaggctggagttcagtgtctcgctgcaagctccgcctcctgggttcacgccattctcctgcctcagcctcccaagtagttgggactacaggcacatgccaccacgattagctaatttttttgtatttttagtagagacggggtttcaccgtgttagccaggatggtctcgatctcctgacctcgtaatccgcccgcctcggcctcccaaagtgctggggttacaggcgtgagccacagcgcccggccaagactctcttttccatttaatcagtgatggaacccaatcagggtcaaacatggcaagaactgcttcaaaatgttgcaaaatacacagaaagccttcaaccacctggaacaacagattacggttaagacgaacagcagacctactaagtcttgggaagaaaagctggagataaaatttccttcagaaattagggtactgaaaagcacacaggtatattatggcatacttttcttatactacctgatctaacagatacaaatttgtttgaaataatactagcaatgtattgggtagtaacagcttccgatagggcaaatgaataacagtgtgttatatgggatgggaggatggaatttggaacagtaagtaataccagcactactcccaaagccagtatagcattatttgaaactgaaggtccattagttataaatggtatactacaaactatagggaattcactaataaaatttaagaaacaagtagacttactatactaatagaagcaagcaaatagaatcatatagaatgctcagttaaaatgaaagcagaaaaagtggagaagttgaaaaaacagtcaagtataagaatagaaaacaattgacatatgtacatattaatccaattatgtcaataccactttgaatgtgtatatctacatataccagttaaaaagacatggactggctgaatagaattaaaaaaacaaggctggaagggcacagtggctcacgcctgtaatcccagcattttggaatgctgaggcgggcacattgcttgaggccaggagtttgagaccagcctgtccaacatgatgaaaccccgtctctactaaaaatacaaaaaaattagccaggcgtggcagtgcatgcctgtaatctcagctacttgggaggctgaggcatgagaatcacttgaacccgggaggcggaggctgcagtgagccgagattgtgccacctcatttcagcctgggcaacagagcaagactctgtctcaaaaaaaaaaaaaacaacaaataaaacaaggcccagcaatgtgtacatgaaaaccattttaaactgaaagatgcaaatacattaaatataaaggtatggaggaatatatgccattctagccctaatcaaaagaaatatggactagctattttaaatttagataaatcaggttttaggtcaaggaaagatacaggggatgaagagatttcataaagataaagaagtcagttatacaagaagacataataatcattaatatctatgctcataaaacaaatcatcaaaatacataaggcaaaacttataaaaccacatagcaaaatacacatgtactagatggcttcccagtacctactggctttcaatgtgtgctaacctcttctttctgggatctctaaataatacatagtttctgttatttcttgcattttgttgagttgcttcctctgtgtcttacctgaccaatatacctgaatctaatttctacccagtcagggctttctttgtaagattattttggcagtggctatcttggtagtaataaaagaaaaactggtcagacaatgggccataaggtgtctaccaggaaaaacaagtttcctctaagacggaaacttggtcactggtctgatatttaggcattaggtcaccttgtactatcctacaagttacgtttggaaggctttcaaattaacctgtttggggaggtcttatgatccagggcttatatcttgtccctgagtaaagaatctttttttttttttttcctttgagacggagtttcgcacttgttgcccaggctggagtgcaatggcatgatcttggctcactgcaacctctgtcgcctgggttcaagtgattcttctgccttggcctcccaagtagctgggattacaggcctgtgccatcatgcccagctaattttgtatttttagtagagacagggtttcaccatgttggtcagggtggtctcaaactcccgacctcagatgatccgcctgcctcggcctcccaacgtgctgggattacaagtgtgagccaccgtgcctggccgttttcttatgtaagaaaataaagtagatcccaaaggaagggactcagaaattcaactctgaaaattaagaagaagagttgtgcgtgacttatgcctgtcatcccaatactctgggaggttggagtgggaggactgcttgagtttgagaacagcctaagcaacatggcaaaacctcatctctacaaaaaatttaaaaattagccagggatggtagcatgtgcctgtagttccagctacataggagacgaaggcaggaggattgtttgagcccaggaatctgaggctgtggtgagccatgatcccagaactgcactccaacctgggtgatagtgcaagaccctgacttaaaaattaattaattaattaatgagaaaatggctgaaaattatttcacagtagatgaaaggccatacagaaaaaatgctcaacaccgatgttaatcagtaaaaagcaacatctaatcacatggagataaatatttataaggaataaacacacatgcacacatggtctgccagttaatccatacatgccaacgggttttcctagcacatttaaatttatccataatccacaacccagcacatttccccctatatgtacaaaatgtataaagtgttagcatttggggacaaaaacaaagatgacattgtcaacaaagtccagcaaaaatgaaacaattcaagtcctatgagccgtggaatatgagagtgaagtgggtgacccacacctcagacagcagcatgaatcaaacagactgaggcaaagaaactaaaaaaaaaaaaaaaaaaaaaccgcccgcagccgggtgaggtggctcacgcctgtaatcccagcactttgggaggctgaggcgggtggatcacctgaggtcgggagttcgagaccagcctgataaatatggagaaaccctgtctctactaaaaatacaaaattagccaggcgtggtggtgcatgcctgtaatcgcagcttctcgggaggctgaggcaggagaatcgcttgaacccgggaggcagaggttgcggtgagccgagatcacgccattgcactccagcctgggcaataacaagagcaaaactccatctcaaaaaaacaaaaaaaccttttcagcatcatattaatggaatattaagtgtaatattaattaactgaaaactcagaagagagaaaactatgcatctggattcatacatgataaacatatactgaataacagtcagtcggtttaaggctctgacctgtggtgcctctgacttctgataacaaaggtgtgccgttcgctgaacaccaaccaattctccagcaataactgggtgtccagtagttcaattcttataccacccagaattaacacagatcccataagtttcttgctagagggctcagtcccacaacaggcccccactgcagatgtcatttgtaagccccaggaactaaccttttaaccaactgtgtataaatacaacagcaccatcctctggttcaataactggctaaaggccaggcgcagtggctcacgcctgtaatcccagcattttgagaggctgaggcaggtggatcacctgaggtcaggagttcgagacctgcctggccaacatggagaaaccccacctctactaaaaatgcaaaattagccatgcatggtggcgcatgcctgtagtcccagctactcgggaggctgagacaggagaatcgtttgaacccgtgaggcagaggttgcgatgagccgagatcgtgccattgcactccagcttgggtaacaagagtgaaactccgtctcaaaaaaaaaaaaaaaaaaaattggctaaaataactcatgaaactcagcaaaacactagtaacttaaggttactagtttgttataaaggatttctcaacaacagccaaatggaaaagaggtattcagcaagggaaagggcagggatggttaaaggtttccctttttttttttttgagatggagtctcgctctgtcgcccaggctggagtgcagtggtatgatctcggctcactgcaagctccgcctcccgggctcacgccattctcctgcctcagcctcccgagcagccgggactacaggcaactgccaccacgcccagctaatttttttgtatttttagtagaaacggggtttcaccgtgttagccaggatggtctcgatctccagacctcatgatccgcccgcctcagcctcccaaagtgccgggattacaggcatgagccaccgcgcccggccatttttttgtatttttagtagaaacggggtttcaccgtgttagccaggatggtctcgatctccagacctcgtgatcggcccgcctcagcctcccaaagtgccgggattacaggcgtgagccaccgcgcccggccatttttttgtatttttagtagagacggggtttcacggtgttagccaggatggtctcgatctcctgacttcgtgatctgcccacctcggcctcccaatgtgctgggattacaggcgggagccaccgcgcccggcaaagctttccctcttgacaccaccttcctagcgcatccacgtgttcaccaacctggaagctgtcccgatgtctttgttcaataaattttattcaacttaatttctagcctccctccctttcctggggtcagaagatggggcttaaagttccagtcctgtcatcatgtgtttgctctttcaggtcaccagtccccatcctcaagttagttacctagtgacctcatgctgagtcacctcattagcataacttcacctaaggtctgacaagagctgggaataacaaaacacattcccatcactcggaaaaatccaaggagtttaggactactttgccaggacctagaaataatgaccaaggcgggtgcagccgctcacgcctgtaatcccagcactttgggaggctgaggtgggcagatcatgaggtcaagagatcaagaccatgctggccaacatggtgaaaccccgtctctaataaaaatacaaaaattagttgggcgtggtggcacgcgcctgtagtcccagctactcaggagactgaggcaggagaatagctagaactcaggagtcggaggttgcagcgagctgagatttcgccactgcactccagcctagcgacagagtgagactccatctcaaaaaaaaaaaaaaaaagaaaaagaaaaagaaacaatgaccaaatatgttttaggctgggcatggtgactcacgcttgtattctcagcactttgggaggccgaggtaggagaatcatctgaggtcaggagttcaagatcagcctgggcaacatggcgaaactgtctttacaaaaaatacaaaaattggctgggcgtggtggtgcacgcttgaagttccagctacttggggggctgaggcaaaaagattgtttgagcccaggagatggaggttgcagtgagccgagatcatgccactgcacttcagcctagatggcagaacaagactctgtttcaaaaattaaaaaggaccaaatatttttaaaaattatatcacagacccaaataaactctcagattcataaaccctttgtccagcaggcagaaccaaaaggtgtctttctctaagtcagccccaacagactttcaaatttgtacaatattctgattaaacaaacacagtgaatgtaaaaccagacttctaataatgttgaatttaaccccagctctgtaatcctggttaatagctagaattaaataaatcaccttaggccaggtgaggcggctcacatctgtaatctcagtacttagggaggccgaggcagccggatcacttgagcccacgagttcaagaccagcctgggcaacatggtgaaacctcatctctatgaaaaatacaaaaattagccgggcctagtggtgcatgcctgtagtcccagctactggggaggctgaggtgggaggatcgcttgaggctgggaggcgaggtggagttttgtagtgagctgagatcatgccactgtactccagcctgggaaacagagtgagactctgtctcaaaaaaaaaaaaaagaaagaaagaaaagaaatcacctcagtcttctaccacctaagtcctgtgtgttctgaacaaacagctgaatgcagtgtaacactctccgcattgcttcgactatgccccctttttaaacctgtaacaagaccaaaaaccccaccaaattcccactttgcctcagaaatgattagctgaacaattctgtcttcaccaaccaggctgcacaaaattaatgtagagcaaactttccttaagtttctcttcctcctgctggactcagtctgagccagcacacaattcctctcatttatttattttgagatggagtcttgctctgtcacccaggctggagtgcagtggcacgatctcagctcactgcaacctccacctcccgggttcaagcgattctcctgcctcagcctcctgagtagctgggactataggcgtgtgccaccacacctgggtaatttttgtattttttagtagagatggggttttgccatattggtcaggctggtcttgaactcttgacctcaggtgatccacctgcctcagcctcccaaagtgctgggattacaggcgtgagccatgcgcccatccacaatccctcctttttaacctctcctaagaactgactgaagtcaaggtgaaacattctgtgatgtaggatctgattttcaccttccatcttactctctctcctaccttctagatttctaatattgtttgctcttcactttgaaaagcaattttctggctgggcatggtggcttattcctgtaatcccaccactttgggaggccgaggtgggctgatcacttgaggtcaggagttcgagaccagcctggccaacatggtgaaaccccgtctctactaaaaatataaaaattagctgggcgtggtggtggtcacctgtaatcccagctactcaggaggctgaggcaggagaatcacttgaacctgggaggcagaaattgcagtgagctgagatcacgccactgcactccagcctgggcaacagagcgagactccatttcaaaaaacaaaaaaaaaaaaaaaaaaagaaaagcaattttctgcctaaactttgagattcttgtagatcttatagttggtagttttctccttttgcaatatgcttttagagtgaagtcacttcttgcccaaatccagatttattttacttgagaatgtctagcaacagtgccacaacagtaacaaagacctcagacagggcatcacaccacatgtctctgcctgtggatctccaactttccagtgctctgcagcttctctcagtataaaaggctcctcccatgtttggaatgaacaggttgggacacctgccagggaggttccccaggaagaaccaactcaactgggtcttcaatgacctccctttgcaggctccagattgaccttagctcagagtcagtcgcctcaggcttctccaccccagtcaaggctactcacttacccttacatgccttacatgggtatttaaaaaaaaaaatacccatgtgtgatgaatccagtaaaatcactccaatccagcatttatgtttataggagggaagaaaaccacaacgcatctatattttatagcttaatagaaaaagcacaagtatctatccgtttcagaaaacaaatgtcattaatttatcattttccataataataaatcatttagtaaatgaataatgatatttgagttctttagctgttggaaagtcctgtcccacagaatttagcattagtctgtcaagtccacataacaggaacagaatagttatccactgtctcaaattctccactctacaaaggagacgaactaacattttggtaaatctttataattcatcaatatatccaccacactttcttgcaaaaatgtattcatttttctgcagtcataaaggaaaagtttttcccaatttctgttcactgctaggccctgaaattccgtttgaaatcatccaataaaaaaacagacctgaggctgggcacggtggctctctcctataatcccagcagtttgggaggccaaggcaggtggatcacttgaggtcaggagttcgagaccagcctggccaatatggtgaaacctcgtctctactaaaaatacaaaagttttagctgggcatggtagcatacgtctgtaatcctagctactcaggaggctgaggtgggatgattgcttgaacccaggaggttgaggctgcagtgagccaagatcccaccactgcactccagcctgggtgacagagcgagactccgtctcaaaaaaaagtaaataaaagttttaaaaagaaataaaatataggactaaatatgtaatgagtttgctgaaacccaacttgttcttgtctctttgaacatactttatcttctttattaagctctaatgataaaatgcattttgcagttaataaaaagctgaaatgagtgaacaaatcttttcaagatgacaaatgcagggaggggctgactggaacacagacaaatctgactactttagtgtcagttcaggtcctcttatcacttgggacatctcccaccccagtgctgctcactgaactgctgagtaattaccctccaaggagaagctccctcaataccgccaaccagctggctcatcagccatgtgtccccagggaatggaaactggggtggggaagaaaagctgaatgtcttaagggctttgctttttgaggaacagtataccaggaaactcctcccaccccacgacatccagctgctcccctataaggtcccaccccccacctctggctgtcctctgggaggagtgactcaaagctgatattcactagacactacaaaagacttagcagctatgagcatcttggagcagccccaaacagttctgtaacccaggaccaggacaccatagagggtgggctgacagatcaccctgtgccatttgcaaagaggaacctcgactgaaaatattcgggtatctctgtgtagacaagataaaggacagccacacatgcactattttttttttctttttcttttttctgagacggagtttcactcttgttgcccaggctggagtgcaatggcgtgatcttggctcaccgcaacctccgcctaccgggttcaagcaattctcctccctcagcctcccaagtagctgggattacaggcatgagccaccaccccggctaattttgtatttttagtagagacggagttcctccatgttggtcaggctggtctcgaactcccgacctcaggtgatccgccagccttagcctcccaaagtgctgggattacaggcgtgagccaccgcgcccggctttttttttttttttttttttttcacactggagtcaagtggttattctttgcttcctcacatgtgaaatgttcacaaacacaaaaacacatcttttaaaaagagccatacattgctatgtgaaaagaaagtgacaattaaaataatgcctctgtttgaaatattgcctgagggacaaagagttcataaagttgctgggaattgatgagagacagttagcctggggaaggctctgaaaaccaagagatttgctgccagccctaggaggagttaggatgaggggatagggtggtggatttgagaccctgctgcccacatctttggaagactcggagggaaaccggtcacctttgggaagaaagaagggactggggaacccacagatcacagcttctcttccaaagcacaaagcccacacacacgagtctggattctgcctggtgaccctccgttgtcaccgtgcagcgtcctcaccgggttcacaggaactgcgagccaggctggaggcgagattgcagttagatattaaccaggtgccctcagccccgctgcctcacggggccgcctccctgagagtcaggtcacagcagacgctgaccgccggcttcctcatcgtgcccggggataagatctcttgagagttgctcacgggtcgcctcagttctttctcggatcctgaattgcagcggaaaggctggcgccaaccaggctgaagaccccacaagggaacccactcagcagaatgcggtttcttcacctccagtcccaggagtcacctctcacttctccaccaaccagcgaccccacactccagccgtccctgtccacacctctaaacaccccatccccaaacctctcagggaggcggatctggggtgtcctcccctctcccccattaaactgtttctgctgcagccttcggcgtctcggtgcagtgactcgggccgtgaacctgtgccggttacaactgcacaatctggggagacgcggagctgcgggcgcggagctgcccagagagggcgccggggccggggccgcagcggccgagcagggacgggacaggacgcccggggtcccggctgccgccccagccccatcttgcggcccaggggaccaagggcagagctgcgccaggggcactgggatttgcagaccccggagtcgcccagggcgaggcccgggtcccctcacggtcggttccggccggttccaacctgccccttctttgcctcgggacgccgggccccgcacactcaccatttcccagcttccaggtgtccgggtgtcctccttaaaagccagtgtgggtcccagcgcgacagacgctgatacagaccttccagggcgtctctctctcagcgccagagccaggactcagagcgcaggggcgtggagaagactccgcgggctctttgaacgtcgcaccctcctccctgcagcgtgcctgattgacagttctcacaatccccgccccctcatccctgattggatagtgctccaggtcccgccccttggtggctgattgacagaagaagcgatctcacagtgctgagtggagccggatgaacaggttccaggcacgacccttggcaaggcgggcttcctcccaacggagtgacctgacccctcccgaagtgacgtttgcattttagaatttcctgattgtattcagtgggttcttcctgctttttcctcctggacagggactcacaagtgtgtgcagggaattccaggctccctgtccagtggagccattcccggacctcggagcaggaggggagcccggggcacacaggccaccctgcagcaggagggagggcctgatgtcctccagggatcaggaatttgggatgaggctgttggcgacgttgccaagcctttccctcaccttatctctcaatctactcattttcagcccagaagataaaaacaggacaacaaaataaaatagttgagtatgtggaaaaactggaattatatggcagcaatatttcataaagaatcaaaagagaagaaaagcaaaaacttgaacaagctcagagaagcagcctactgcactcacagttcacaagcagaccccctttcaggaggtcaaacatatccccaagctgggaagccaggcaatgattcctaaaatggagctccggggtggatcagaagctggtgataagggagggacaattaagaattttactctgaggtctcaaaatacctgtcccctctgcacagcgtggaaatgctccctccttatgccattaaatgttaatgaattaaacgctccaatcaaaagccaagacatcacactttgaatttgaaaacattagcctttctccatatgtttatgaagtaaaaatactagacttaaaagcgttatggccgggcgcggtggctcacgcctgtaatcccagcactttgggaggctgaggcgggtggatcacctgaggtcgggagtttgagaccagcctgacaaacatgatgaaaccccgtttctactaaaaacgcaaaattagccgggtgtggtggcacgctcctgtaatcccggctcctcaggaagctgaggcaggagtatcgcttgaacccggcaggcagaggttgcagtgagccgacatcacaccactgcactccagcctgggcaacagagcgaggaaaaaaaaaaactccatctcaaaaaaaaaaaaaaaaaagcgttatgaactagaagctggtagccatggctaaatagaaaggagctgaacatgagatgtcaatagatgaaatgaaatcttcaatcaacttctagaaactatagcattttctgccaggacaaatgggcacgtttagaaaatgaatgaaaaaaatgacgtctgagtataacctaatgcataaatgatactgtttccttaaaaaaaaataataagcacacacacagacacacacacacacactcccacagtctattatgctagaaactgctctctgaaggataaactactattttatgaaatgctccacccctcactcctcacattaactgctcctggaacaatgttctatttatttgtttccacacatattaaaagagggcacaatgtatcaaactaactgattgtcaggggtttatatacagattctgtatatttttacaaatggcaacaagtaagtagttgatttctgcaatgatttaaatacatataaaagcttccagacaaaaatagctgttcgcattaccatgatgaaggaaaaatcaacaatggtgagacccacaccccctcccccagagaaagtataaaagaaatcctaagagaagctagaaagcccaaaatttgtatgtgcaagtttaaacacaatatagaaagtattgctgttagtttcctcacagtcagttctatggcaacaccatgcttttctgagttaggatgtttatttctgagtttgtcttttttttttttctgagatggagttttgctcctgttgcccagactgaagtgcaatggtgcaatctcggctcaccgcaacctctgcctccgggttcaagcaattctcccacctcagcctcctgagtagctgggattgcaggcatgcgccaccacatctggctaattttatatttttagtagagacagggtttctccatattggtcaggctggtctcaaactcctgacctcaggtgatctgcctgcctcggccacccaaagtgctgggatgacagttgtgagccactgcacccggctatttctgagttttttaaaagaaaaggaaacacaactccttccccaaccctctgtcacgaagatatcctctaatatctgctgctaaatgtaccatttcagtgtgagttaactttaatgcatgcagtaaggagctcagttcgtgtttctgaaggtcaatattcaacttccttagtagcttgttgaaaagactttcccctttaatttatcttggcctatttgttgaagattaattaactatccatgaagagtgtcttagtccatttgtgctgctataatgaactactgccaagtgggcaatttataaagaatattaattagttttctcgtagttctggatgctgggaattccaagataaaggtgccagcacctagggagggccttcttactgcatcttctggagggaaggaacactgcatcctcacagggcagaagacagaagggcaagagagggcgagccccatccatcaaaccctttatagtggcattagtctattcatgagggctctgccaaaagactaaaagtccccaactcccaaaattgtggtgctggggattgagttctcacctatgaattttgaggggacacaaacattcaaatgatagcaaagggggttatttccggactctcaattctgtcatattatttctgacatcttcccagtaagtctggctactatactacctacctgatgatggagagccccaccccattcctgacagtcaagcatgacacatgactgtcatgcacagatagaaacggtcctaaagccacaggaagatctcctagacacctccttggatgacctagacttactatcattttgagaaggcctctcttaacacaattgtagggaaaacatagtaactggttttgccataatttctccacatgaaacaattgaggcatactctttactcactgtaaaatcagcctgagcctctagctcattgctcttactagatctcgaatgttggcaaaggggaaactgccaccattgacaatgattccagatatgctttgggagtcttttttgccattggcacaatctgaaaatcctttgcatttacaacttgttctggtacacccattgccaatgaacatacataactggggcactattacaggttgttcacctctctactaaaatggctattgttcactgtctagcccatactaaggagacttctactacatctctgggcattaaaagactgctaaacaaggcggggcacaatggctcacgcctgtaatcccaacactttgggaagctgaggcaggtggatcacctgaggtcgagagttcaagaccagcctggccaacatggagaaaacccatctctaccaaaaatacaaaatgagccggcatggtggcgcatgcctgtaatcccagctacttgggaggctgaggcaggagaatcacttgaacctgggaggtggaggatgcagtgagctgagatctcaacattgcactccagcctgggcaataagagcgaaactccatctcaaaaacaaaacaaaacaaaacaaaaaaagactgctaaacaggaagccaaaaatggcaccttatctccgctgaattcacaaacctgcctttagccttgatttatgttatcaagtaaaagctcaataatcggaaaaacatcaataggtacaaaggggagacaactattgcacagattatacgttaggccaatcacactgtagctcctttcttttgatgttctgccttgtgctaatcttccactggattggacatggacgcaaatgatggatacttaatagtctaaaaggcaactggctctgtctgccttggcatgcacaaaatatctgacccaattatttcccagtgtgctgcttgtaaacttgcccaattgctggatgaaaccaacatacctcagagaatcctccaatgcccatgctgcccctcacaatattccagatggattagcttctctccagcttgaggccattcccattgtttggtggttgtctgcatgtttaatggatgggctcagtgctgtacagctacacatgctcatgtatgaatggtgaagtaattaataactgaaattatttctcattttggcatgcctttgtaggctgaatcagaccatggaagtaattattattattattattattattattattattttattttttatttttttttttgagatggagtctcgctctgtcacctaggcttgagtgcagtggcacaatctcggctcactgcaagctccgtctcctgggttcacgccattctcctgcctcagcctccagagtagctgggactacaggtgcccgccaccacgctcggctaatttttgtatttttagtagagacggggtttcaccgtgttagccaggatggtctcgatctcctgacctcgtgatcctcccgccttggcctcccaaagtgctgggattacaggcgtgagccactgtaccccatggaagtaattttatagctgatataaaacacattcttccaaaaactatggaggacttattaaaattttacaccatccttaatcatcagggcaaatgtaaaaatctaaacatacagggcaagaggggctttagggtaatatctgtcagaacacaggatatcaatggccagaagaagaaaatatgagctgacactttgctgggtggaacattatgatgtacccctgcctgccatcaaaataagagccattgtcattcaaaataagaaccatgttttatatataagagctatgaattcatgtaagccatgtcaaacttgacatgtatcagcatttcaaggacaattggaagaccatttctacaggtaaccaccaaggaagatcgtcagagccaattcccaggctccagaaataaatggcatcacaaaatatagataaaaacaaacaaacaaacaaaatgacctgactcaaaataaacaaaggacttgaaataaagttgtttggccaggcaccgtggctcacgcctgtaatcccagcactttgggaggctgaggcaggcggatcacctgaggtcgggagttcgagaccagcctgaccaacatggagaaaccccatctctactaaaaatacaaaaattatccaggcgtggtggcgcatgcctgtaatcccagctactcaggaagctgaggcaggagaatcgcttgaacctgggaagcggaggttgcggtgagccgagatcatgccattgaactccagcctgggcaataagagcgaaactccgtctcaaaaaggaaaataaataaataaacaaagttgttcaaagaagttatataaatgacaattatgtacatgaaatgatggtcaccatcattgatcgttaaggaaatgcaaatcaaaaccacaatgaaattccaattcacacccattagcatggctattatacagccaatgtgggagaagacggaagaaatggcaactcttttgcattgctggggagaatgttaaatactgcagccactgtgtaaaacaggataagtattcctgacaaaggtgaacttagaatttctctgtaacccagccattcaactcctaagtatacacccaaataaatagaaatcagaaacacacatggacacacgtaacccaatttcatggcagccttattcacaattcccaaaacagtattgtggatataacccatacgttcatcagcctatgagtgaagaagcaaagtgtggtttacccataaaatagaatgttcaggcataaaaaactgaatcactggtacattctgctgcatggaagaaccttgaaaacattttgctaagtgaaataagtcagacacagaaggacaaatattgtaggcttttacttagaatacctagaatagtcaaattcatggagcaaaaaagtagaagagagattatcagggcctgacaataaggtggaatgaggagttcttttatttactgggtgatgagtttctatgtggagtgatgaaaagttctggagatagctgcagtggtcacactgagtcataaatgtatttagtgctactgaattgcacacgcggttgctcacacctgcaatcccagcactttgggaggccaaggcgggcagatcatgaggtcaggagatcgagaccatcctggccaacatggtgaaaccccgtctctactaaaaatacaaaaattagccgggcgtggtggtgggtgcctgtaatcccagctactcaggaggctgaggcaggagaatctcttgaacctgggaggcagaggttgcagtaagttgaggtcgcgccactgcactccagcctggctacagagtgagactcctcctcaaaaaaaaaaaaaaacatttcaatggcaaattttatgttagtatgtgttacttcaacacaatttataaatgaaagacaagacacaattccagttattagagatgaacgtaactatatctgggataaaaacatacactggataggactgtgcatattggtatctacctgtagctactctggagtctgaggtggcaagatcacttgaacttaggaattaaaatccaactgtggcaacatagccagacctcacctctaaagagaataataataaaataataataatacactggctgaagccacatatggtggttcatttctgtaattccagctacttgggaggatggtgtgggaggatcccttcaggccaggagttcaagacctgcctgggccacatagtgagaccttgtctctaaataaattttaaaacttagtacagtgtggtggtgcatgcctgttgtcccagcaacttgaaggctgaagtgggaggatcacctgagcccaggaatttgatgcttcagtgagcatgatcacatcactgcataccagcctgggtgagagagcaagaccacaacttaaaaaaaaaaaaaaaaccagagagagagagaatagcagtagaaagtatttaaaatgaaacaccaatcaaaaaaatgaccaaaaaatatgaacagaacatcagtgagctgtgtggtggtgactacacagctacaagtaacctttttttttgagacagagtctcactctgtcgccaggctggagtgcagtggcgtgatcttggctcactgcaccctccgccttccaggttcaagcagttctctgcctcagcctcctgagtaactggaattacaggtgcccaccaccacacctggctaatttttgtatttttggtagagacagggtttcaccatcttggccaggctggtcttgaattcttggcctcatgatccacctgcctcgggctcccaaagtgctgggattacaggcgtgaaccaccgcacctggccaacatgtaacttttaaaaaatgatcagaggccgggtgtggctcacgcctgtaatcccagaactttgggaggccaaagcaggtggatcacctgaggtcaggagttcaagaccagcctgactgacatggtgaaaccccgtctctactaaaaatacaaaattagctgggtgtggtggcacgtgcctgtaatcccagctatttgggaggctgaggcagaagaattgcttgaacccaggaggtggaggttgcagtgagctgagatcacgccattgcactccagcctgggcaacaagacgaaactctgtctcaaaaaaaaaaaaaatcagactgtcaacaatcagttgtgtgatgggacaactacaaggactcctaaaaaggcaggaggaaacatagaataaaaatttttgttaaaaatatatcagccatggccaggtgcagtggctcactgcactttgggaggccaaggcgaacagatcacttaaggccaggagttcgagaccagcctggccaacacggtgaaaccccatctctactaaaaaatacaaaaattagccaggtgtggtggcgcatgcctgtaattccagctactccagaggctgaggcatgataatctcctaaacctgggttgtggaggttgccagtgagctgagattgtgccactgcactccagcctgggtgacagaatgagatgctgtctcaaaaaaaaaaaaaaaaatcagccacacattttccaaattggatgaaaactataaaccttgaaatacaagaagctcaacaaaccacaagcacaaaatgtatgaaaaaaatctacaccaagacacatcatcatcaaactgctgaaagtcagagataatgaaaaaattttaaaactggagaaaaacgacaccttaactatagagacacaaagactgattacatacttatcatcagaaacagtccaaaccagaagaccagagaaaaatttttaagaaactaaaaaaacaaatatgtcaaccaagaattctatattcagcaaatatctttccaaacaaagagaaaataaatactttactcagtcatgctaaaagtgtttgtaatcagcatacttgctgattgtcaattgaattcccagagcagaagaaaaatgttaccagatggaaatctgtgaagaatgaaaagcatcagaaatgctaactacttgagtaaatacaaagaagtttttactactgtctatttttagaataaaagatcactgaatttgtaaaagaaaaaaaagttgggggaaagcatgggaaaaaatgggggaagcatttatcttttggcttacaaacaatccaattttatgctgttaattattttaagtgcataactagattattgttaactataatcatcctgttatgttatcaaacagtaggtattatttaatctttctatttttgtgcccattaactgtccccacctctccatcaccaccccactagtcttcccagcctgtagtaaccatccttctactttctatctccatgagttcaattgttgtgaattttagatccacagatgagtgagaatatgcaatgtttgtatttttgtgcctggcttatttcatttaacataatgatctccagtcacatccatttgttgcaaatgacaggatctcattctgtttttttaagggaaaataaatttattaagaaagtgaaggaataaaacaatggctactccataggtagagcagccttattttttatggctgaataatactccattgtgtatgtgtagcgtattttctttatccatttatctgtttatggacacttaggttccaaatactagctattgtgaacagtgctgcaacaaacatgagagtgtagatgtctcttgaatatactgatttcctttcttttgggtatatacccaacagtgggattgctggatcatatagtagctctatttttcattttttgaggaacctcaaaaatgttctccatagtggttgtactaatttacattcccaccaacagtccatgatggttccctttttctacctcctctccatcatttgttattgcttgtcttttgaatataagccattttaactggagtgagatgatatcacactgtagttttgatttggatttctctgaagatcaatgttgttgagcaccttttcatatgcctgtttaccatttgtatgtcttcttttgaaaatgtcaggctgggccgggtgcagtgggtcatgcctgtaatcccagcacttggggaggccgaggcgggcagatcatgaggtcaggagattgagaccgcagtgaaaccccgtctctactaaaaattaaaaaaaaaaaattagccgggcgcagtggcaggcgcctgtagtcccagctacttgggaggctgaggcaggagaatggcatgaacctgggaggcagagcttgcagtgagccgggatcccaccactgcactccagcctgggtgacagagcgagactctgtctccaaaaaaaaaaaaaaaagaaaatgtcaggctgggtgtggtggctcacacctgtaatcctagcactttgggaggcctaagcgggtggatcacctgaggtcaggagttcaagaccagcctgaccaatatagtgaaacctctactaaaaatacaaaaattagccaggcatggtggcttgcgcctgtagtcccagctacttgggagactgaggcaggagaattgcttgaacctgaaaggcagaggttgcagtgagctgagactgcgccactgcactccagcctgggtgacacagcaagactccatcccaaaaaaaaaaaaaaaaaaaaaaaaggctattcaaatgtttgtcccattttttattggattattagattttttcctatagaactgtttgaatttcttatatgatgtggttattaatctcttaacagatgagtactttgcaaatattttctcccaatctgtgtattgtttcttcactttgtggattgtttcctttactgtgcagaagatttttaacttgatgtaatcccatttgttcatttttgctttggttgcctgtgctcatcaggtattactcaagaaatcttttctcagacctgtgtcttggagagtttcctcattgttttcttgtagtagtttcctagtttgaggtcttagatataagtctttaatccattttgattttatttttgtgtgtggtgaaaggtaggggtctagtttcattcttctgtatataaatatccagtttccacagcaccatttattgaaaaaactgtcttttccacagtgtatgtttttggcacctttgtcaaaaatgagttcactgtgagtgtgtagatttgtttctggattctctattctgttccaatgatctatgtgtctatttttatgccagtaccatgctgtttggattactatagctctgtagtataatttgaagtcacgtgatgtaattcctccagttttattcgtttcacttaggatgacatttgctattctgggtcttttatggtcccatataaattttagaatttttttttctatttctgtgaaaattgtccttggtattttgatagggattgcactgagtctgtagattgctttgggtagtatgaacatcttaaaaatattgatttttccaatccatgaacatggaatatctttgcatttttttggtgtcctcttcaatttctttcatcaatgtttttatagttttcattatagagatctatcacttctttggttaagttcattcctaggtatttaattttatctgtggctattataaatgggattactctttggatttctttttcagattgttctctgttggcatacagaaatgctactgacttttgtatgttgatttttttatcccacaactttactaaatttgttcacagctctaatagttttttatagtctttgggtttttccaaataaaagaacatatcatctgcaaacaaagataattggatttcttcctttgcaatttggatgcccttaatttctttctttctgtctttcttattatctgctccagctaggactttcagtactttgttgaataacagcaatgaaagtggcatctttgtcatgttctagatcttagagaagactcaattttttccccattcagtatgatattagctgtgggtctgtcatatatggcttttattatgttgatatatgttccttctaaacccaattttttgagggcttttatcattaagggatgtttaattttatcaaatgctttttcagtattaattgaaatgattatttgttttttgtccttcattctactgatatgatgtattctgttgattgatttaagtatgtcaaaccaaccttgcatcccaaggataaatcccacttggtcatgatgaataatctttttcatgtattgtagaattcagtttgctagtattttattgaggatttttgcatcaatctgatcagagatattgacctgtagtttctttttctgatgttttttctagttttggtgtcagagtaatactggccttgtagaatgggtttggaagaatttccttctctattttttttggagtttgagtaggactggtattagttcttctttaaatgtttggtagaattcaccagtgaagccactgggttctggcctttttttttttcctgggagaatttttattacagcttcaatctcattacttgttattggtttgttcaggttttgggtttcttcatggttcaatcttggtaggtagtatgtgtctaggaatttgttcatttcttctagattttccaatttattggcatatagttgctatagtagccactaatgatcctttgaatttctgtggtatcagttgtaatgtctccttttccatatcttattttatttatttggatcttctctcttttttcttagtgtgtctaaaagtttgtcaattttgtttaatgtttcaaaaaactaacattttgttttattgatcttttgtgctgttttcatttcaatttcatttatttctgctctgatatttattatttattttgttctactgatattggatttggtttgctcttgcttttctagtttgttaagatgcattttgtttatttgcagtttcacttttttgacttatagtttataaacttatagctataaacttctctgtcagtactgcttttgccatatctcataggttttggtatgttgtgtttccattaggatttttttctagaaagttttcaaattttcttcttaaagtcttttttgactcactggtcattcaggagcatattcttaatttccatttatttgtctagtctccaaaatgcctcattattgatttttagttttattgcattgtggccagagaagatgcttgatactattttaattttttgaatgttttaagacttgttttttgacctaacatatggtctatttttttagaataatccatatgctgagggaaataatgtgtattctgcagccatttgatgaaatgttctgtaaacatctattaggtccatttggtctacagtgcagactaattctgatgtttctttgtgggttttctgtctagaagatctgtccaatattgaaagtggggagttgaagtctccactattattgtattggtgtttatctctctctttagctctaataatatttcccttatatatctgggtgcgccagtgttgggtgcatatgtatttaaaattgttatatcctcttgataaattgatccctttatcattatatagtgaccttctttgtctcattatagtttttgtctggaaatctattttatctgatataagtatatctactcctggtctttttttgtttccattggcatgtcatatctatctttttccactacttgatttgcagtctatatgtgtctttacaggtgaggcatgtttcttgtaggcaacagatcattggattttgcttttttattcatttagccagtctatgtctttttattggagagtttagtccatttacattcaatgttatttttggtaaggatggacttaatcccgccattttttcattcgttttctggtcttctcttccttctttcattttttcctgtcttcctttttgtgaaggtaatttttttctaatggtagaatttaatttcttgctttttgttttttatgtatctgttgtaccttttttaaaatttaaggttaccatgaggcttgcaaacactatcttagaacccattattttaaactgatgacaacttaacagtgattgtataaacaaacaagagaaaagaaaactcatgaaaactctacactgtcccacactttaaaactttttgttgtttctatttatatctactgtactgcccatgtcttaaaaattatagttattattttttgagtgattcatcttttagtttttctacttaagattaggacacacaccacaattacagtattataatattaatattttgtgtttttctatgtacttactactaccagagacttttttctaccttcagaggatttcttattgctcattaacatccttttctttctaacagaaaaactccctttagtatttctggtgggatagtctggtgttcatgaaatcccttagcttttgtttgtcttggaaagcctttgtttcaccttcatgtttgaaggccattttcaccagatatactactttagggtagaagtttttttcttcagcacatttaaaatatggccatgccactgtctcctggcctgtaaggtttcccttaaaaagtcttctgccagacattggaattccattgtgttttatttgtttcttttctcttgatgcttttaggatcctttctttatacttgacctttgggagtttgattattagatgccttgaggtagtcttccttgggttaaaactgcttagtgttctacaaccttcttgtacttggatattgatatctttctctaggtttggaaagctctctgtcattaaatctttgaataaactttctacccctatctctttctcaccctcctctttaaggctaataactcctagatttgcctttttgaggctgtttcctagatctcataggtgtgcttaattcttttttattctttcttttgtctcctctgacagtattttcaaatagcctatcttcaagctcactaattctttcttctgcttgattcattctgctgttaagatgctatgatacattcttcaatatgtcaattgcatttttcagctcaagattcctgcttgattctttttttttttttttcgagacagtctcactctgtcactcaggctggagtgcagtggtgcgatctcggctcactgcaagctccacctcccgggttcacgccattctcctgcctcagcctcctgagtagctgggatcacaggcacccgccaccatgcccagctaattttttgtatttttagtagagacagggtttcaccgtgttagccaggatggtcttgatctcctgacctcgtgatccacctgcctcagcctcccaaagtgctgggattataggcgtgagccactgcacccagcctcatacaagagttttgattaattcacatagttgccagcatttgttattttgttgttcttaggtagtagcaaaataatgaaggtgagggtgtgtggatgtcattgctgttttgatttgcatttccctaaccatgagagagagatgttgaacatctttatgtgattatcaccttttgtatgcttcattagaggaatgtctattcaattccctaacatatttttcaacgtaattgtattttacccagcatgggctgctgaaataaaataccaagtattgagggtattaacccaccaacttttaattctcactgtacaagaaattattaagtaagtccaaggtcaacgtaatggcagattcagtgcctgataagggtctgcttcatggtacaagcaaggctgtcatctcattgagttctcatatggtgaagagcaaaagaaagctacctagggaatcttataagcccattcataagggactaccctcatgatctcatctaattctaactacctccctgagatcccatatcttcattccatacattaggaagtaaggcttcaacacttgaatttcaggagacaaactcaataattttctaccctgcctccccaaatttatatccctacatgcaaaatacatttatttcatttcaacagcatcgaaagtcttgagtcagtccacgattaggtgtaaagcctaaactcaaactccattaaatatcatctgaatcagatatgggtgagagttgaggtaacattcatcctgaggcaacattcttttccaaatgtgagccttagaaaacaaaccggttgtgtgccctagtgttgagacaggcttaggaaaacacttctatttcaaagaagagaaatatgaaaggaggaagtggtgacagttcccaagcaagccaaaaacccagaaggtaaccttcatataagaataatcctctttgggccaggcatggtggctcacgcctgtaatcccagcactttgggaggcggaggcgggcggatcttgaggtcaggagatcgagaccatgctggctaacacggtgaaaccccatctccactaaaaatacaaaaaattagcctggcgtggcggtgggtgcctgtagtcccagctactcgggaggctgaggcaggagaatggcgtgaacccgggaggcggagcttgcagtgagccgagatcgcaccactgcactccagcctgggagacagcgagactccgtctcaaaaaaaaaaaaaaaaaaaaaaaaaaaagaagaagaatcctctttgactcaatattctggaaaagagattggtgggaaaggctctctgacatgatcaaggatgactgaaaaacttacacaaaagcaaagacaaatctttactaacaaggaactcaaaagatcttctgaaatcctctacaatgacaacaataatgacattatgatgatgtagaagatttaaaagatgcagagccattgattgggacctgaacgcattgcagcagtttttcaacaggcagaggtgttaaagattattatcctcaagtaagatccctcagtggagcaaagtctccacctcacctgagtaattacaacatgcctacaaacacagtagatgattcaaagaaataaaggaataagattcttataacaacatttctaactaagcatttgcatatatgaagactgaaccctcagtacttatagatcttcagccctcaagccaaacagatcctgactgtattatttagcctcctccaaagagtcaacatctgcaatcagaaccttgttcttataacatagatgattgttcggatgttctgtcagaagattccatttaacctgatctctcactacgtatctacaataccacatgtctagccacctcaacaaatcacagtgttaggcaccatacagtgatcatcatcactatcactatacctgggtaatcaagagagacaaactaggattttgctgaatattaacatactctttcaggtcaattctcaaaaggaatctgtgtgtattgaaggaaattgtaactttctggctgacatgtactatttagggaggcctgtgatggttgccctgtactgaataagtatagactttttctcaataattccctaagcaatataataactatttacatagtatttacaatgcatgaagtattataaataatctaaaaatgatttacagtgtgcaggaggatgtgcataggttacatgcaactatgtcatttttaaaaagggactttagcatctgtggattcaggtatccttgggaggtgatagaaccaatctcttgaatatatcaagagataactatattcaaaataaatggaaactacttaagtctttataacatctttatattcatagggcttatctccaatgtgaattcttcctcatatcttaaataaaataagattagcgaatgcttctcccacattccatacatttagagggtttctctttagtgagtccttttatgtccattaaagtaagtgggagaactgaatgctttttcacatcccttacattcatacagcttctctccagtgtgaattttttcatgtatacaaagggaactggaaaaactgaaggctttaccaaattgcgtacaatcatggttttgtttccagtgagttctttcatgccttaggagggaaaaggacaaaaacaaaatgctttcttacactccttacgttcatggagtttctttccagtgtgagtcctgtaatgatttcaaaaagaacagacatcgctaaaggctttcccacatttacatttacagtgtttctccccagtgtgtgtccttttatgtctttgtagaaaactggaagaatcaagggctttctcacataccttgcatgtctgagatccatctccggtgtgcgttttcatgtgtctttgaaagcttgtgcatgaaagaaggctttcccacattgcttacatttatagggtttctcttcagtgtgagttctttcatgtctttgaactaaactgagataatgaaagcttttcccacatatcttacatttatgatttctacttccagtgtatgttcttgtgtatatttgaaagcctctgagatgataaaatgcttttacacattgcttaccttcatagggttgttttccagtttgagccttttcaagtatttgagtgtaacagaaaccactgaaggctttcccacattgtttgcatttataaggtttctctccagtgtaagttctttcatgtctttgaaatggtctgtgagaattgaagcctttcccacatatcttacatttatgaggcctatctccactgtgcattctcatgtgtgtttgaaagcttctgagacgattaagtactttctcacattccttacagtcactaagtttctttccagggtaaggcctttaatgtattcaaaggaagtggcaataactggaggctttctcacattgtttatgtgtatgtggcttctctccatattcctgatactcatgtggcttgtgttgagcatgagctctatggtagcaattaagatgaacgacccatgctgacttctccacacacactgctttcacgtggttttgctcaagggagacttttttttttttttgagacggagtttcattcttgttgcccaggctggagtgcaatggctgatcttggctcactgcaacctctgcttcccaggttcaagggattctcctgcctcagcctcccgagtagctgggattacaggcattgtgccaccacgcccggctaattttgtatttttagtagagacggggtttctccatgttggtcaggctggtctcgaactcccaatctcaggtaatctgcctgcctcagcctctcaaagtgctgggattacaggcgtgagccaccgagcccggcctcaagggagatttttgttgttcacaataccacctggaatgtggctgaaagtttctccaaattatctacctcctttacttttacagaatcagtctaccatatgatatctgtaaaaacagagaagtacaattactacaggtttgtttataagtgttttttatatatattaataggtcttaaatttacattgttgacattatcatgcaaagcttaggtgtcatgccctgtttgaacatgaacggactgaatgctgtgcaagataactcaactgtggctatcatcggaacagtaatattcacgtgggaattcttagtactgttttccaaggaaattattttgcagacacacttaacagctatgtcccatttaagtatgtttttgaagaaaattttctaagagtgaataaatttaagccaggattattcttttttatttatttatttatttatttattttgcttgttttaaaattttcctgtctttttttttagacggagtcttgcactttcgcctgagctggagtgcaatggcatgatctcgactgactgcaacgtcctcctcccgggtacatgcgattctcctgcctcagcctcctaagtagctgggactacaggttcacaccaccacgcctggctaattttttgtatctttagtagagacagggtttcactatgttggccagactggtctcgaattcccgacctcctgaactgcgccccacccccccaccctttcaaagtgctggaattataggtgtgaaaaatttcctgtcactttaagaattattccaaagacatatctttctcttcctagggcaaattaccttagatttcttctgggaattttgtactaatctttaatgttttggtcttcccatttcattcctaaaatgtagacccagaagaatcactatatattattataaaattacattgaggccgggggcggtggttcacgcatgtaatcctagcactttgggaggccgaggtgggtggatcgtctgagctcaggagttcgagacaagcttgggcaacacagtgaaaccccgtctctactaaaaaatacaaaaaaatattagccgggcatggcggcgtgcgcctgtagtcccagctactcgggaggctgaggcaggagaatcagttgaacccaggaggcagaagctgcagtgagccaagatcgtgccactacactccagcctgggtgacagagcaagactccatctcaaaaaaaaaataataataaataaaaataaaattatattaaaaatgtaagattttatgtagactgcagttatggatgatttattcaccaaaccacagttgactcttcaacaacacaggtttgaactgcatagatctccttacatacaaattttcttcagtttctgctactactgagacagcaagaccaacccctcctcttattcagcctactcaatgtgaagacaataaggatgataacatttatgatgctccacttctacttaatgaaatagtaaatatagttttttctccttgtgattttctgattaacatttttctctgccttagtttattgtgagaaaacaatatgtaatgcatatgacatataaaatatgtgttaattgaatgtatatcttaccagtaaggtttctggtcaacagtaggctattagtagtcaagttgcgggggagaaaaaagttatttgaagatttgtgactgcattgagggctggtgcccctaatccctgcattgttcaagggtcaaacgtatttcttttatattctaaatctttgaacagcattggtgacgaagaaacaaatattcgtaattgactaagtaaagacatgatgtcccccttacctatacagtctaggttcctgatggtttcccgtagcacatctctgtagagactcttctatgatggacccagcaaagcccactcctcccaggcaaaagatcaaagccacatcctcaaaggccactgagtcctgaaacacccgacacgtgcagaggaggaaagctgaaactgacagcactgggaatctgtactcactacataaatgtcacatgatgctgtggtgtccaaacatttatgcaacgacacggtaatccaactcttaccctctttctaaactcattttctcccagaatgcaattctaatgctagaattaaacgtgtttggtaaaataacagtcgaattataaaatgccactccttggtgagttaaaggagtgacatttattgcctagatcacccctaatatctatgtgtacaggatgtttgtaattcctgatgtgacaaagtcctcctacctaatgggcagaagagttaacatcagctgtcctgagaccgcatattgttacaaatgcttgctcacaaagttgaacctttcactatatctaggaactaaatttagttagggggcttcaccaacataagcgataatggaggatgagtgtccctaaactatgtaaaaaatatggtatctgctgaactcctatgttccctctgagagttcaaacttttgtgatatgcttggcagagggagcatacctgatcattcactactaggttttttgcttgtttttgtttttgtttttgttttttttgagacagagtcttgctctgtctccaggctggagtgcagtggcgcaatctcggctcactgcaacctccgcctcctgggttcaagcgattctcctgcctcagcctcccgagtggctgggattacaggcgcacaccaccatgcccagctaatttttgtatttttagtagagacagggtttcaccatgttggctaggatggtctcgatctcttgacctcgtgatccacccacctcagcctcccaaagtgctgggattacaggagtgagccaccgcgcccggccattcactgctaggtttgaatgtttgtcccctccaaaatgcttgttgaaacataatcgccaatgtggcactaatgaaaggtgaggcctttaagaggtgagtagatcttaagggttcagacctcataaataaattaatccattcatgaattcatggcttactgaattaatgagttatctcaggagtgggactgatggccatattaaaaaagaagggaacctgagctaccacattcagcccattctccatgtgataccttcaaccacctagaaactctgcacagcccccatgaccaagaaggctttcaccacatgaagccctcttacttgctaggttccagaactataataaataattttttttgttgttttttggcttttctttttagatggactcttgctttgttgcccagatgggagtgcagtggcacgatctcggctcactgcaacctctgcctcctcctgggttcaagcaattctcctgtctcagcttccttagtaactgggactacaggtacatgctaccacacttggataatttttgtatttttaatagagacagggtttcactatgttggccaggctggaagaaatattgttttttaaataaattactcagcttctactattctgttataagcaacagaaaacatactaggataagcatgaaaaaaccactcaccactgggtctcttatgagctttttttggtagataacatttcccacattttgtcacaacttgttacttaaaggataaagcccatccaatctgaacacattataggagactatttggaaggtggcatctgctttcctctagaccaaattcagttaagtatgacaaaagactaatgaaagatgtctcactatcccaatgggaaacttacgctttttattgggtaataacaaaggataataaagaaggaaaaagattgcacatgttcactcctgtaatcccaacactttgggaggctgaggcgagtgaatcacctgaggttgggagttcaagaccagcctgaacaacatggagaaaccccatatctactaaaaatacaaaaaattagccgggcatggtggtgcatgcctgtaatcccagttactcgggaggctgagataggagattcgcttgaagaacctgggaggcggaggttgcggtgagccgagatcgcgccattacacgccagcctgggcaacaagagcgaaactccatctcaaaaaaaaaaaaaaaaaaaaaaggaaagaactcaatatcacctctcataaatatctatgctagtccctaaatccctaaaacagttgttttaatagtgaacaaaaattgcattagcaaatctagtaggaatcacaaatgtctaaaagtgagaaaaatgttggaacagaaacatgaaatcttgcctgaaatacataaaggattcaagggtgaaatatgcaagacactatactattaatcgagagataaacaaatagaaataggaatgtgaataatggtaggaaagcctagcagagtttttaaagtttcttcttattctaatctctcctccacttcagtgacagtcttgaggacaacagcctaggttcccagtgtgagatcctggtcactgattctaaagagagcagatcagatttaatgtgcaaattattgcctttgtatgttacaatctgttttgggcctttccaaaggtctcaaacaaggctgtcttctctgtttcatctatgttggaagccaattagaataaacactagcaggaacatcttaaaaattttacgaaaaacataaaaagcctgcaaccacattggactatagattatgattaagacatacactgaccagctaatggccaggaagaaaagctggagagaaaatttccctcagaacttgggatattcaaaagctcccaaattagccatggtggcatgtccctgtaggctcagctatttgggaagcagatgcagaaggatcacttgagcccaggagttcgaggctgtagtgagctataattgtgccactgcactccagcctgggtaacagagcaagaccccatataaataaataaataaataaataaataaataaataaataaataaaattaattaattacttatttaaaataaaataaagcacccagttataggaggtagtttcctgagacctggaagaagaaaaaaaaaaaaagcaccagggtatactgaggaattaagccccatgcagtcaaacgacagaaaaacacattttcacaaaagacccaagaccatcgttttcagatgtggcagatcttgaggcttggttaaacagaaagagaagggtgaagcagagctttaagcagctgggctaaggattcgaggaattctccagctcagatccatccacagagactgacagaggtcaattttttgcttgtttcattttctctttttctttcagtttctggcattgtcagaacactgggtgaatataagctaaagggacagagacctcagtgactacactggacagggaatacagtctctataaatacacttctgaaataaacaagattaccaaacaaataagcaattacagccttcagcgaacataaatcgcataaaaaagaagggggagaatttgatttacagagttactcttattataatattcaaatgtctagttttaacctttattttaggttccagggtacatatgcagtttttttatatagacaaacttgtgtcatgggagtttggtgtatagattatttcatcacccaggtactaagcatgatacttgatagttattttttcttatccttttcttcctcccacccttaagtatgcctcagcgtctgttgttcccttctttgtgttcacatgttcccattatgtaactcccacttattaagtgagaatatgtgatatttggttttctgttcctgtgttagtttgttaaggataatagcctccatctccatccatgtttctgcaaaggcatgatcttgttcttttttatggctgcatagtatttcttggtgtatatgtgccaaatgtgctttattcagtctactgttaacaggcatttaggttgatttcatatatttgctattgtgagtagtgctgcaatgaacataggtgtgcatgtgtctttatggtagaatgatccatattcctttgggtatgtggatccaataccccagtaaatgggtattggattgctgggtcaaacggtaattcagtttttagtgctttgaggaatcaccacgctgctttccataatggttgaactaacttaaactcccaccagcagagtataagcattcccttttctccacaaccttcccagcatctgttattttttgactttttattaatggccattctaactggtgtgaaatggtatctcattgtggttttgatgtgcatttctctaatgattagtgatattgggcattttttttttcatttgcttgttgattacatgcatgtcttcttttgaaaagtgtctttaatccatcttgagttgatttttgtatatggtttaagaaaggggttcagtttcaatcttttgcatatggctagccagttatcccagcaccattgatgagtccttccccactgcttgtttttgtcagctttgtgaaagatcagatggttgaaggtgagcagcattatttctaggctctctattctgttccattggtaatgtgtcagtttttgtaaaaataccttactgtagccctgtagtatatagtttgaagtctggtagcatgatgcctccagctttgttctttttgcttaggattgccttgactatttgggactttttaagttatttttttccaagaactaagtcttgcatttgctaatcttttgtatgtttttttttttttttgtatctcaatttccttcagtttagctctgattttggtcattttagctctgattttggtcatttcttgtcttctgctagctttgggattggtttgctcttgcttctctagttcttctagttgtgatattgggttattaatttcagatctttctttttgatttgggcagttagtgctataaatttccatcttaacacttctttagctgtgccccagagattctggtatgttgtatctttcttctcagtttccaagaatttcttgattttggtgttaatttcattatttactcagaagtcattctgaaccaggtcatttaattttgatataattgtatggtttggggagattttcttagtcttgatttctatttttattgcactgtggtctgagagtgcagttggtatgattttgtttgcttgtttttttaatttgctgagggttattttatgtctgattatgttactgattttagagtatgtgccatgtggtgaggagaagaatgtataatctgttggttttgggtggaaagttctgtagatgtcatatccatttggtcaggtgttggtggaaggctaaggaggagcaaaggcaaatgttacatggcggcaggcaagagagcatgtacagggaaactgccctttataaagccatcagatttcatgagacttattcactatcacgagaacagcatgggaaaaccgcctccatgattcaattacctcccactggatcactcccatgacatgtggggattatgggagctgcaattcaaaatgagatttgggtgagtaagtctcatgagatccgatggctttataaagggcagttcccctgcacacgctctcttgcctgccgccatgtaacatttgcttttgctcctcctttgccttccaccatgattgtgaggcctccccagccatgctgaactgtgagtcaattaaacctctttttcttcgtatcaccatgggtgccagctcccagttaataacgctttttttttgtttgtttttaaatagagatgggggtttcaccacattgcccaggccggtcttgagctcctgagctcaagcaatccacccacctcagcctcccaaagtggtgggattgcaggcatgagccacggtgcctggcctcataatgcttttatatctggtattcttcataaaaatatgaagatgaatgttttcaaattcaaagtctaatgtctcagcctttgattgaagcatttaattcaataacatttataggcttgatggaaggagcatttccacgctgtgtttaggagacaggagggcaaattgaactcccagagttaaatccattagtgcccctgactcatccccaggttctgatccaccctagggctccatttcaggaattatcgtctggcctccaagctttggaatatgtttggcctcctgaaagtggttgacttgtgaactgtgtgtggatgcagcaggctgcttatctgagctagttcaagtttttgctttataaaatattgccgccatataattccagtttttccacacatttaacaattttatttatttcttttttcttttttctttttttttttttttgagacggagtctccctctgtctcgcccactctctcactgcagcctctgccttccaggttcaagtgattcctctgtctcagcctcctgagtagctgggactacaggcgtgcgccaccacatccggctaatctttgtattttagagacgggatttcaccatgttggccagactggtctcgaatttctgacctcaggtgatccacctgcctcagcctcccaaagtgctgggattacaggtgtgagccaccacgcccggctttgttggggtgtttttatattctgcactgaaaattagtagattgagacataaggtgggagaaaggcttggcctgtgcagccaacagcctcatccaaaactcctgattcctggaggacatcagcccctcccttctgctgcagtgtggcctgggctcccttcctgctctcaaatcaggggatagctccactggacagtgagtctggaatttcctgcacagacttgtgggtccctgtccaagaggaaaaaggaggaaggtcaggacatactgcctaaatgcaaatgtcccctgggagggggtcaggtcacagcgcagggaggaagctagtcctctcaaggcctgtctggaatctgtttatcaggttccactccgctgcccgagatcgcttcttccgttactcagtgcccgggggagggacctggcgcactatccaatcagggccgcggggcggggtcgtgagaactgtcaatcaggcgcactgaccggaggagggtgcaaggttcaaagagcccgccgagtcttctccacgcccctgcactgggctccgggttctgtcactgagagacgccctggaacgtctgtggcagcttctgtctcgctgggacccgcactgacagcgggaggcagagggaggaacctggacgccggaagccgggaaatggtgagtgtgtgaggtctggtgtcccgacgcgtgagaggagagactggttggaaccggccggaaccggctgtggtggcaccaggtcttccccgccggcgacaccctggcgcagctcggccctcggttccctcggccgcacgatggggctggggcggcagccgggaccccgggcgtcctgtcccgtccctgcgcggccactgcggccctggccctggaggcctgtctgggcagctccgcgcccgcagtcctgcgtctccccagattgtgcggctgtaaccggcacaggttcgcggcccgagtcactgcaccgagacgccgagggctgcagcagaaacagtttaatagggggagaggggaggacaccccagatccgccttcctgagaggtttggggatggggtgtttaggggtgtggacaggggcggctggggcgtggggtcgctggatggtggggaagtgaggggtgactcttgggactggaggtgaagaaaccgcattcttctgctgagtgggttcccttgtggggtcttcagcctggttggcgccagcctttccgctggaattcaggatctgagaaagaactcaggcgactcttgagcaactctcagagatctcatccccaagcacaatggcgaagccggcggtcagcatctgctgtggcctgactcttggggaggcggccccgcgaggcagcggggctgagggcacctggttaatatctaactgcaatctcgcctccagcctggctcgcagttctgtgaacccggtgaggaggctgcacggtgatgacaggtcaccaggcagactcgtgtgtggggtttgtgtgtgggaggagttgtggtctgtgtggtcccctgtcccttctttcttcccaagggtgacccgttcgccttcgagtcttccaaagatgtgggcagcagggtctcaagtccaccactgtgttctctcatcctaactcctcctagggccgacagaaaatcccttggcttccagagccttcctcaggctttctctcctcaattcacagcaactttatgaactccttgtcccccagtttatttttcaaacagaggctagtattttaattgtcattttgtttatacatagcaatatatggctctttgtaaaaggttttgtgtttgtgaacatttcacatgagaggaagcagagaaaaaccaccagacatttcgctgtaaaaaaaatgaatattaataaataaaatctttgttactgtcctcccttcatcatccctagacagagacaccttttgagaatgtctttggattaagtttcctctttggaaacgttacagagtgatgagtccccagcccatcctctatggtttcctggtcctgggtttcagagctgcctggggccaccccaagatgcccacagctgccaagtctcttgtagtgtcaagtgaatatcagtccctttgtcactcctcccagaggacaccctgaggtggagatggtgggaccttgtagggaagcagcatgatgccctgtagtgggaggagtctcctggtatacccttcctcaataagctacttccttagaacactcagcttttcttcccccatcccttccttggggatatatggctggtcagccaattggatggtggtattaaggggacaggactgaaatgattcttcccttctgatgttctcagactaatgaagggagaaaactatccctaaggacaggaaaaccaactccactgaggtggtgcaagaacctgaaaagctaacaatgtagtgtctcctgggatcatggttattgagcacttcggtgagcagcatggtgatgggggatgttccaggtgataggaggacctgacttgacacactctgcacccatagggaggtggtgaaaggagatgatggtataagggatgcatatggatcaaccaaattgaagaactgggagaagatagagaactagaaactgtgtcaagggtcataaaaccccttttttggtatggaaaaacgaaaccacactcaaaatggaagctgaggtaacaaactgagtaaaaattaatgaaaactggaaagtctatagttagttgatcattgtatatggagatgctgggcagaagatggattattctcctgtaggtaaccatttgtctccatcatttctgttgaagtgtccctcatttgtatcactgcctggcaatacctgctgtgtcataggttcttgtaccttaagtagatgctcttgttccagaatttgccatttttcattggtttatgtatccatcagtctgctaatatcatactctcctgattactatagtcttcaaagccttgatgtgtggtagagaaagacccttcctaacttagtcctttgggttgctataacaaatttaccatagactgcatgccttacacaacagatattcatttctcaaagctataaaggctgagaattcagtttcaagcagcaggtcagttgtctactaaaggactctttttttttttattttttatttttgagatggagtcttgctctgttgcccaggctggagaacagtggcatgatctcagctcactgcaacctccgcctcctgggttcaagtgattctcctgcctcagcttcccaagtagctgggactacaggcacatgccaccaccccagctaattttttgtatttttagtagagacggtgtttcaccatgttagccaagatggtctcgatctcctgacctcatgatctgcccacctcggcctcccaaagtgctgggattacaggtgtgagccaccgtgcccagcctgggcctctttcttgatttgcagatggcattcttcctgttatgccctcacatggtggagatatgtctgtaatgtctgtctagttttggtgttaaggcagttgtattagtccattttcacactgctataaagaactaccagaaaagaggtttaattgactcacagttcctcatggctggggaggcctcaggaaacttacaattgtggcggaaggggaagcaggcacttcttacatggtggcaggcaagacagcatgtgaaagaggaactgtcaaacacttataaaaccgtcagatttcatgagaacccactatcacaagaacagcgtgggggaaaccgcccccatgatccagtcacctcccacaggtccttcccttgatacatggggattatggggattacagttgaagattagatttgggtggtgacaaagagccaaaccatattatcagtgttggccttacaacatgaattagaaagtgttccctctgcttgtattttctgaaagagattatagagaattggtgtcatttcttccataagtgttttccagaattcaacagtgaaaccatgctggcctgttcctttttcttgggactttttgtttgtttgtttgcttgaagtggagttttgctttgttgtccaggctaaagtgcagtatcatgatctcactgcaacttctgctccctgggatcaagtgatcctcccacctcagcctcctgagtggctggaactcccactacagcctcctgagtggctggatgtgccaccccatcctgctaattttttgtgttttctgtagagatggggtttcaccatgttgccgaggctggtcttgaactcctgggctcaagcagtctgctgatcttggcctcccaaagtgctgggattacatgtgtgagccaccacgcctagcctaccactgcactatagcctgggtgacagaacaaaactctgtttcaaaaaaaaaaaaaaaaattgaatgcaatctctagaaagcaaagatatataaccaatgcttaaaaaccttccactttaggaaactaaagaaagaatagcaggatacatgtaaatcgagcagaggaaaataacaatgagagaaggtattaatgaaatagtaagcaagaaatcagtagaaaacattaacaaaccaaaagctggttccttcaaaagatcaataaaatgaataagcccataggcaagctaactcagaagaaaggggggttatgattactcatcttgtgtacattaaaggacctcaaaggagtattaggaacaactgcatgcccacatagttgataaattacatggaatggaccaattccttgaatgacacaagctaccaaaactcacaaaaggagaactaattaatatgaaaaggcttataactattgaagaaattcaatcaataaataataaaagtcccaggctgtgggcagcaagccacccaggcgccgaggcaagagaccgaggacacgagctgttccagtataataaaatataaaacaagaatagttataccagatatagatcttagatatgattatatatgaatatcattaatcattagttggcagtaattactctttattccaatattataataatcctcactctataatcataacctacgaaaaaccaggccatacagagataggagctgaggggacatagtgaggtgtgaccagaagacaagtgtgagccttctgttatgcctggacagggccaccagggggctccttggtctagcagtgacgccagcgtctgggaagacgcccgttgccaggcggtccgtggtctagcggtagcaaaaagtgtcaaggaacacccactacttagcagaccgggaaagggagtctccttttccccgggggagtttagagaagactgctcctccacctcttgtggagggcctgacatcagtcaggtttgtccgcagttacctggaggcgtaaccatctccctgtcatgctgtgcttcagtggtcacactcctagtctgccttcatgttccatcctgtacacctggctctgccttctagatagcggtagtaaattagtgaaagtactaaaagtctctgatatgcagaaataatggcgtaagctgtctttctctctgtctcctctccctctctgccttggctgccaggcagggaagggcccccgtccagtggacatgtgacccacgtgaccttacctatcattggagatgactcacactctaccctgccccttttgcttttgtatccaataaataacagtgcaaccagacatttggggccactactggtctccgcacattggtggtagtggtccccgggcccagctgtcatttcttttatctctttgtcttgtgtctttatttctacgctctctcgtcaccgcacatggggagaaactcaccgaccctgtggggctggtccctacaccaggccaggctgggtgcactggtaggctaggcatggtggctcacatgtgtaatcccagcacttttagctgctagcattcaggaaatctatcagaatactggatgaacacaagctaagggaacagagacttcagtgactacactggacagagaatacagtctctgcaaacatactctgaaaatgttactaaacaaatgaataattaaaaccttccacaatcccagcactttgggagaccaagattggcagactgcttgaacccaggagttcaagaccagcctgggcaacatggtgaaaccccatctctacagaaaacacaaaaaattagcaggatggggtggcacatccagccactcaggaggctgtagtgggagttccagccactcaggaagctgaggtgggaggatcacttgatcccaggaagtagaagttgcagtgagataataacactgcacttcagcctggacaacaaagcaaaactcctcctgggttcacaccattctcctgcctagctcccgagtagctggaactacaggcgcctgccaccacgcccgactaattttttgtatttttagtagagacagggtttcaccttgttaacgaggatagtctcaatctcctgacctcgtgattcgcccgcctcggcctcccaaagtgctgggattacaggtgtgagccactgcgcccggcctgctttcaattctttacatttccttctaagcacattctaaaaattttgctatgatatactctttttttatcaacattgcaatatttacatttgcttgagaattctctttgacgcttttatagttgagaggcttgtcacttaaatctccaggtttttaggcttttcaagtatgtttctgttatttattgctactttaattataatatagtttgatcgcatattttatagaatttctatttttaaaaatgtgttcaagtgtgttttatgattcagaatatggtctatcttggtatatacttcatgagggcttgaaaataatgtgtagcctgctggtgtaaaatgaaagaatctgtaaatacacatcaattaaatctagttgattaatagtattcttgagttcacatgtatcattagtgattttctgccaaactgatctgtcaattattgaaagaggtgagttgtttttctccaactatagttgtagatttgtgtattttgtcatgtggttttataagtttttgccttatgtattttcatgatctgtgtttatgggcataaatgttaaggattattatgtcttgtaggattgatctctttatcattatgaaatatctccatcgtgtgtaatttttttgacctaaaatcttatttgtctgaatttagtatcagtgttccatatttcttttgattagggctagaattgcatatatttatccaaacctttctatttaaaatggttttcttgtgcacatcgatgggccttctttttcattatactctgccagtccctgccttttttactgttgaatataggtaatacacattctatgtcataactgatgtaattggattaatatcacatatatgttattgttttccatttattgtacattatctgtttttttccactttctcctttctgccttctttcattttgactgagcatgtatatgattccatttgcttgcttctatgagtatagtaaatctctttgtttcttaaatgttattagtgaattcactagagttggtagaatactattcacaactaatgagcctacagtttcaaataacactataccggcttcaggggtagtgctgatataacaaagtattctgaattcctctattgtattgcccaatacattgctgatattattatgttgaacaaacctgtatctattatattagatcagataggtataagaaaactaaagaatttcaaatgtcttcatttaattctaagagtcttcgtgtgtgggtgtgtgatccaaatttctaatctatttaatttttcttctctccgatgaacttcttttaacattactagcaagacagttgtatcaatcatacattctatcaatttcattccttttttttctccttagtctaaataacttcaattgttctatcttcattttagctgattttttactttggttgctcacatctgttgaacatctatagagaaattttcattttagatgttgtgctttgcagttgcataaattaaatatggtccaatttctaattttgtattgatatgattttattcatacatcccttttctggttttcttttagttctttgttcataattgcctttacctcattgaacatatttaagacagttgctttaaagtttttattcaataagtctaatgtctgaggttctcagagatggtttatctaaattaaattttttttccattgatgagctatatttttattcttctttatagtctttatggattttttgtgttgtaaagcagacatttgaatgttataatctggaaatcagattcccttcactgtttgcccttctggtttgtggaaggttttaattattcatttgtttagtaacattttcagagcatgtctgcagagactgtgttctctgtccagtgtagtcactgaagtctctgttcccttagcttgtgttcatccagtattctgatagatttcctgaatgctagcagctaaaagtaaaaaagacatgccaaacaaaaagctgacctcttccagtctttgtggatgggtctgtgatgtagtatttggtgaacacttagccagactgcttaaaactctgctttagccttacctttctgttttaccaaactgagagatgatgcagagctgaaaatgagggcctccccaggtcttttgtgaaaatgtgttttttccagtgcatgcatttccagtacatgcattctcaattccccaaaacactggagtgcttttgaatgcccccttttttttgagatggagtctcgcgctgtcgcccaggctggggtgcagtggggcaatctcagctcactgcaagctccgcctcctgagttaatgccattctcctgcctcagcctcccgagtacctgggactacaggtgcccaccaccacgcccggctaattttttgtatttttagtagagacggggtttcaccgtgttagctaggatggtctcgatctcctgacctcgtgatccgcccacctcggcctcccaaagtgctgggattacaggcatgagccaccgcgcccagcctttttttttttttttttgtgacggaatcttgctttatcgcccaggctggagtgcagtggctcaatctcggctcactgcaacctccgattcgcaggttcaagcgattcttgtccctaagcctctcgagtagctggaactacaggtgcccgccaccacacctgactaatttttgtattcttagtagagacggggtttcgacatgttgaccaggctggtctcaaactccagacctcaggtgatccacctgcctcagcctcccaaagtgctgggattacaaacgtgagccaccacgctcagcctgaatgccctaatttctgagggaaattgttctctccttttttattcccaggacttagatgttctaccatatgtcttaatcataatttgttgtcccagttgtttgaaggttttttatgtattttgcaacaatttgaagcagttcctgccaagcttgacctaattaggctccatcattgattaaataaaaaagagaactttctttcagacctttggatagtccacagatggattgaaaaatacaaaggtgcaataacttacaaataagatctgatctgctctctctagggatccacattggaaatttggtctgctgttttcaagactggtgctgatgtgaggagggattgggacaaggacaaataaaaactccacaaaactttcctactatttgtcaccttccttattctatttgtttatctctgtgttaatagtacagggtactgaatataatatattcaccatactttatctgtttttggaaagctgttgctttcttggttagaaggattttagcatttttagatgtttgtgacttctattagatttggtcatgtaatttttaatgatgacaaaaaggtctgtttagggatttagggaaatattatagatattcatgagagatgacattgagtttttttctaagaacatatgcaatcttggcccttcttttcttctttgacattacttaataaagtttaatttttccattgggatggtaaaatatccttattagtcttttgtcatacttaactacatatgttctacagtaaaccagttgctagcttccaaatgttctctcttagtgtagtcacatagcacaggctaaatcccccaaggcacaagggtcactcattacagacacagtgaccagagtgttttttccctttttttttttttgaggcggagtttctctcttgttgcccaggctggagtgcaatggcgcaatctcggctcaccgcaaccttcgcctcccgggttcaagcaattctcctgccgcagcctcctgagtagctgggattacaagcatgaaccaccataccgggctaattttttgtatttttagtagagacagtgtttctccctgttggtcaggctggtctcgaactcctgacctcaggtgatctgcctgccgcggccttccaaagtgctgggattacaggtgtgtgccactgtgcctggcctcagagtgtttttttcatggcttagtctgttttttgttgcttataacagaatactttaacctgggtaatttataagaaatgatatttattttttacacttctggagggtgggaagcccagcatcaaggctgggcatctggtgagagccttcttgctggtaactctcttttgcacaataggtagtaggactttgtcatgacaagaactgcagacccactgtagaaatagaaatgaggagtgattcaggcaataagactcactttcttaacttaccaacaagaggcgtgttcctattcaactgttactttacaaaacatgttcatttctaggatcagaattgtgtgggataaaatgagtgtaaagagagaataagagtgggtttaccatgttcttgaataaatgcttggaaaccacagcatcatgtgaaggttatgaagtgaatttacattcccagtgccttcagttttaatattcctcctctgcacatgtgaaatatttcaggactcagtggcatttgaggatgtggctataaacttcacctgtgaggagtgggctttgctgggtccatcacagaagagtctctacagagatgtgatgcaggaaaccatcagaaacctggactgtataggtaaggatgtcatcatgtcttcacttagtcaattagagacatttgtttcttggtcatcaatgctgttcaattatttgaaatatggaagggtatataattggcccttgaaccagccacccaagcagtcatacatcttctcccgcacaacttaaccactagtagcctactgtttactggcagcattactggtaacataaacagttgattaatacatgtattatatgtcatatgtattacatgctatatattctcacaggaaagtaagctagaaaaggaaaatattcattaggaaaccataggtaagtggaacattatttagtattcatagaaaatacaacattacaaagttttcattctgattgtctttacattgagtagactgaataagaggaggggttggtcttgctgtctcaagagtagcagagactgaagaaattcatatgtaagtagacctgtgcagttcaaacctgtgttgaagactcagctgtagtttggtgtgtgaatcatgcatgattgtagtgtacataaaatcttacagtctttctataattttataataatttatagtcatttttctggttctaacttttaggaatgatatggcaaaatcatgatatagaagaagatcagtacaaagatctcagaagaaatctaaggtaatttgcactcacaagagaaagctgtgtccttgaagtgattcatagtatgccagaaattttattttattttgtttgttttagagacagtgtctcactttgttgctcaggctggagtacagtggtatgatcatagctcgctgtagcctcggactcctgtgctcaatggtcctcccatttcaacctcctgagtagctagggttacaggcatgcaccaccacatgtggctacatatttagtttttgtagagatagagtcttgctgtgtttgaccagactcatctccagctcctgtccttaagcgttcctcctgccttggcctctcaaaaggcaggtattgcaggcatgagccactgtgaccagcccaaaattttaaaaagaagcaaggaaaattaacaagcccaccttaaatttatttattcttagaaaattttcttcaaaaacatatacttaaatgtgacatggctatggctattcagtgcctgcaaaatagttcccttggaaacagtattaagaattcccatatgaatgtcactatcttcaaaacagctggggttgagttaccttgtacatcattctgtccattcatgttcaaagagggcatgagacctacactttgcatgataatgttagaaatgtaaatccaggccaggtgcgatagctcacacctgtaatcccaactatttgggaagctgaggcaggaagactgcttgagcccaggtgttcaatcagcctgggcaacgtggcaagacgccctttctacaaaaaatacaaaaattagctaggcatggtggcctgtgcttgtggtttcagttacttgggaggctgagacaggaaggttgcttgagcccaggaggtcaaagccgcagtaagccctgttcacattactatactccagcctgggcaacagagcaaaacccagtttcaaaaaaaaaaaaaaaaaaagaaaaagaaaaagaaaggctgggtatggtggctcacccttgtaatcccagcactacaagaggtcaaggtgggcagattgcttgagctcaggagttcaagactagcctgggcaacatggtgaaacctcgtctctataaaaaatacaaaaatctaatctcagcattttgggaggctgaggtgggcagatcacgaggtcaggagatcgagaccatcctggctaacatggtgaaaccccgtctctactaaaaatacaaaaaattagccaggtgtggtggcaggcgcctgtggtcccagctacttgggaggctgaggcaggagaatggtgtgaacccgggggaggtagagcttgcagtgagccgagattgcgccactgcactccagcctgggcaacagagcgagactccgtctcaaaaaaaaaaaaaaatcagccatgtgtggtggcttatgcctgtagacccagctatttgagaggctggggtgggaggatggtttgagtccgggaggtggaggttgcagtgagctgagatcacaccactacactccagcctgggcaacagagcgagaacctgtctcagaaaaaaaaaagaaaagaaagaaagaaaagaaatgtaaatccaatacttattaatacaaaatcatttataaacaaacctttactaatgtacttcttattttttacagatgtcatatggtagagagagcctgtgaaattaaagataatagtcaatgtggaggaccctttacccagactcaagacagtattgtgaacgagaaaatacctggagtagatccatgggaaagcagtgagtgtacagacgtcctcatgggtcgttcatctcttaattgctacgttagagttgacagtgaacacaaaccatgtgagtatcaagaatatggagagaagccatatacacatacacaatgtgggacagctttcagttatcagccctgctttcaaatacatgaaagacctcagcatggaaagaaactctatgattgtaaggaatgtgcaagcttcagttctcttgaaaaccttcaaagacacatggcagcacaccatggagatggacctcgtatatgtaagttgtgtggaaacgcctttatttggcctagtttatttcatatgcttagaagaactcacactgaagagaaaccatatgaatatgagcagtgttctacagcgtttcctgcttatagttccactctaagacatgaaagaacacacagtggagagaaaccctatcaatgtaaacaatgtgggaaagccttcagttgttcctgttacactcaactatatgaaaggactcacactggagaacaatcctatgaatgtaagcaatgtgggaaagcattttatcatcttggaagctttcaaagacacatgatagtgcacactggagatgggcctcataaatgtaagatatgtggaaaaggctttctttctcccagttcagttcgaagacataaaagaactcacactggagagaaaccgtatgaatgtaagtattgtgggaaagcattctctgattgcacaggttttcgaagacacatgataacgcacactggagatggacctcataaatgcaaggtatgtgggaaagcctttgattctcccagtttatgtcgaaggcatgaaacaactcatactggggagaaaccctataaatgtgaatgtgggaaagcctttagtgatttctattactttcgaaatcatgaaactactcacactggagagaagccatataaatgtaaacaatgtggaaaagccttcatttgttgcacttaccttcaaatacatgaaagaattcacactggggagagaccctataaatgtaaacaatgcggaaaagccttcaggtcttccaattacattcgagtacatgaaaagactcacactggagaaaagccctatgaatgtaagcagtgtggaaaagcactttctcatctgaaaagctttcagagacacatgataatgcacactggagatggacctcataaatgtaagatatgtgggaaaagctttgattctcccagttcatttcgaagacatgaaagaattcacactggggagagaccctataagtgtaaactatgtgggaaaggcttcaggtcttccagttacattcaactacatgaaaggactcacactggagagaaaccctatggttgtcagcaatgtgggaaagcattatctgatctctcaagctttcgaagacacatgataacacatactggaaatggacctcataaatgtaagatatgtgggaaaggctttgattatcccagttcagtgcaaagacatgaaagaactcacactggagagaaaccctatgaatgcaaggaatgtggtaaagccttcagtcattcaagttacttacgaatacacgaaagagttcatactggagagaagccgtataaatgtaaggaatgtgggaaaccattccattgtcccagtgcctttcataaacatgaaaggacccacagtatggagaaaccctataagtgtaaagaatgtggggaagcatttcattgtatcagttcctttcataaacatgaaatgactcactagagaaaacccctatgagtgttgaacatgtgagaaagccttaagtactttcagcttcttacaaatacataagagactcacactgaaaaaagttgtatgaatataaaaatgtactaaaaccttccatttttttcagtaccttttgaaaacatgaccaaactcatacttcaaaaatatatatataatgaatgtgaggaatatgaaaaaactttctttgtctagcaaactttcaaaggtggttattataacatactagcaatggaccttactactgtaaggaatgtagaaatgcatttactagtcctaattcatttcagttacatgaaagatttcaaactgcagagaaccactatgaatgtaaacaatgtggtaaagcatttagtagcttcagtttcttttgaatacagtcttctctagtttctgaggtgaattgattccagcaccctcaggaatacctatattcagagatattcaagtccctgatattaaaaacagcatatttgcatataatctaggcacatttttctgtatatcttaaatcatttctagattacttataatacacaatgcattgtaaattctgtataagttgcttttgtattatttagggaatcatgacaagaaaaaagtctacatgttcagtacaaatacaactgtcattcattgtcctaagtacgtgtacatgtcagcaacaatgtcaggatctgtggagtttgcgagtataagatctttaagtgttgaaggtttcatctccataattgcagctgctttagctacaaatattataggaagctgttccttctttttctttacatcaccaaaccttccagtggttataggcattttgttatccttcaagtgacctggagcctttgttgcatgacaggattgtacctgaagatcacattctttaacaattggacctactgaatctgtaaaactactagaagaaaacatattgaaaatacttcaggacattggtttaggcaaagattttatggctaatacctcaaagcacagacaacaaagataaaaatagacaaatgagactatcttacactaaaaagtagctgtgcaaagtaaagggaacaacaagagtgcagagaaaacctgttgaatatgagagaatatttgcaaactatgcgacaagggactaatatccaaatatacaaggaactcaaacatctcaacagcaaaaaatataaataatcccattaaagtgggaaaaggatgtgaacagacagttctcaaaagaagacatgcaaatggccaaaaagtatatggaaatatgttcaacatcactaatgattaggaaaatgcaaattgaaaccacaatgagatactctacttagaattgttcttactaaaaaagataaaaaacaacaaatgctgatgaggatgtggagaaaagaaaactttcactgttggtgaaagtataaattagaacaactactgtggaaaacagtatgtagatttctcaaaaacctaaaaatagaaccaccacatgatccagcaaaccaagtataaccacaggaaaagaaatcagtatatcaaagagatacttgcacttgcatatttatcacagcactattcatgataacaaagatatggaattaacctaagcatccatcagtggacacagggataaagaaaatgtttatgtacacagtggaatactatttggccataaaaaagagtaaaatgttattgctaacaacatggatggaacttgaggtcattatggtaagtgaaataagccaggcacagaaagacaaataccacatgttctcacttatatgtgggaggtgaaaaacttcacctcatggagatagggaatagaataagttatccggggctgagaaggggaaatgaagagaaattggtgaatatgtacaaatttccatttagatcaaaggaataagttctgatgttagaaagcatactagagtgaactatagttagcaaaaatatattgcatatttcaaagtagttggaagagaggacttgaaatgttaccaacacatagaagtggtaaatactcaagatcatggataccccaaatacgctgacttgaccattacacattctatgcatgcaagaaatgctcatgtgtaccttatatatatgtaaaatatgtatcaataaaagaaaatatataagatagttttaaaataacactattgtcaggtgtctgtgggctgaggaacagcctaaggtgtaaacttaagttcttctcaggtcttttcttagttgcacctgtccctgggcatgtgtggtaactgtctaattttctctgcatgtatggttatttttgcacaacctaatcttcagtggctctcaaaaggagaggaataaaagcattaagggaaaaataaaaggcaccagcctggaagtcacttcagatggaggggaagggccttcaaaaaatggagagagatgcagcagcaacagtcaccaccacttctttgtctgtaactctgtgatcagaagcaacaattatcaagcagtgcgcagatccccaatatttggaagacaggtcctttttgtccaccctggccccccaaaactgcatgcagactgctgttagaacttatgcatagctacctgtcatggagctgaggagggggaatgagtcagggctgctgactcaactaagagttgaaattgaccgaaattaacccaattttattagccaattatttccctggaagctgcaagcttttaatagtatccgcagtttcaaaatagctacatgagttggattctgccaatgcaaatccaggtgggggatacagattcttcatgctttttattctgccatcttccttgaatcctctgacctgactttttatactaatacattacttcaggtcccatcccacatgtcacctcctcagcaagtctttctgtcacctcagttactcctttccatatatacattttttttaatacacttttcagagtcagggaaatccgattaggttcacagactttactgctttcttaacaacctatgaaaagtcaaatcatataaatgaaccaaactgaatagtgtcactgttacttttatgaagtgttatcccgtagatttaaaaaaaaagaaagaaagccgggcgcggtggctcacgcctgtaatcccagcactttgggaggacgaggagggtggatcacctgaggtcagaagttcaagaccagcctggtcaacatggtgaaatcccgtctctactaaatatacaaaaattagccgggcgtggtggcaggcgcctgtaatcccagctactcgggaggctgaggcaggagaatcgcttgaacccgggaggcagcggttgcagtgagccgagatcgcaccattgcgctccagcctgggcaacaagagcgaaacttcgtctcaaaagaaaaaaaaaactgctttgcaccgatttgcagaaaaagagacaacgaactccctctcgtggtgaggatggcattaacatccacacataactcctttagggtgtggatttctgaattgtgctgagatctccagaatttacagcaagtgatggtcagtttaaaatattctgtgccttcaatgaagaagtagtgtagcaggttagggagaagagaagcaaataaaatggatgaggtcctcacttagtatatcacaatctctcctggaagactatttatttatttatttttttgagacggagtctcgctttgtcacccaggctggagtgcagtggcgtgatctcgggtcactgcaagctccgcctcccgggttcacaccattctcctgcctcagcctcccgagtagctgggactacaggcgcccgccaccacgcccagctaattttttgtatttttagtagagacggggtttcaccgtgttagccaggatggtctcgatctcctgacctcgtgatccacccgcctcggcctcccaaagtgcttggattacaggcatgagccaccgcgcccggctctggaagacaatttcaaatgaataaatcaaggaacatgagagagccacaagggagttcaacctgagtccagttagactccttgaaagggaaagctatttacagaatacttcggatttagctgcggaaatgatttgatgggtcagtggtggtggagtgaggttgagaccatttaaaataggtgacgtaaacatgtgaaacctcagacacagagcccttggtgttaaccatgatctgttgaaagtcagaagaatgaagcagagggaattgttggaagctcacatttgattagcttttttacatataacatgtgttgacaaggccgggagcggtggctcacgcctgtaatcccagcactttgggaggacgaggagggtggatcacctgaggtcaggagatcgagaccatcctggctaacacggcgagacctcgtctctactaaaaatacaaaaaattagctgggcgtgttggcgggcgcctgtagtcccagctactcgggaggctgaggcaggagaatggtatgaacccaggaggtggagcctgcagtgagccgagatggcgccactgcactccagcctggacaacagtgcgagactccatctcgacaacaacaacaacaaaaaacaatgtgttgacgtagaaattatttattgatgtatttttctcaaactaataattattttgaagggttttttttccaccatgtaaacataaccaactcccaggagcttccatgtgtatatgcttaaatgtataatatgtgtaaaagttctatcagacttaaatcatccatttatcacactttaaacacctatgaatgaccagcctgggcaacataccaagacctaatttctaccaaaaaaattttctttctaatgatccaggcatagtgacatgtacctgtagtcctagctactccagaggatgaggtgggaggattgcttgagcctaggaggttgaggctgcaatgatccgtgatggcatcactgcactccagcctgggtgacacagtgagaccctgtctcaaatagaagaaaatgtcaaataagatgaatgtgattgcttaaactcttccacacagaagaatttatcaagatggtcttcagaggtatatcatgaggaagcagtacagtgcaatgaggaaaaaacaacaaaaaacaagtgaagggggcagaagacctcaattctactctttactctctctagatgtgaaacaaccttgggcaagtcactgcgcctctttgagcctgttatttcatctgtaagaagctgagataattaatatatcatagataatgtagtgttctcagtagaaactgaaacagcactctgagatcaaactcattaatattcctacaacaaaatgagtaaatacttgaaacagaacaaaacagccaataaatagcctcttatttcttgatgtcaggttcatgcctaccttacaaaatagagttgtcagagctttttggttcgtagaactgaagaaaagggactgtagactcatggaagtgtctaatgtcagaaagccagatatgtcaaagatgaatttctgaaattaaaacattttatttgggaagaaatacttgtaattcagggcatacacacagaccaagtggtctttggtatgtcttaaaaacagagaacattggaggtttcatgaaaaggagaagtgttacatatggttcttcaagaaagttcattggcactagtaaggtttttgggagttggaaagttctgatcgggaaatgatggcaatgagtaaaactattcttagagccacagcaagttgtttcagtaactattagataaaaccggtttcaggatacaactggctgtttcagcagcttggcagagaatgacatgcttggagcattggtacgtgccctgagtgcttttcccccttggcctgttgactcttatagttgagtttggcaagaatgacccaatttatgtgatcaacattcagtttgctaattcacaacaaaacaattttctgccactccatgactaatgtttttaaatagccctcagcctttggcttgaacttaccaaaggacttttcaaactaaaccatgtccactcttttttttttttttttttttttgagacagtctcgctctgtcgcccaggctggagtgcagttgtgcaatcatgattcactgaagccttgacctcctaggctcaggtgatcctcctgcctcagcctcctgagtagctgagaccacaggtgcatgccaccatgcccaactaatttctatagagacaaagttttgcagtgttgcccaggctggtctcagactgctgggctcaagcaatccacctacctcagcctctcaaagtgctaggattacaggcatgagccaaacatttaaagaactaataccaatcctactcaaattattctgaaaaatagaggaggaggccaggtgcgctggctcacacctgtaatcccagccctttgggaggccgaggcaggcagatcacgaggacacgagttcgagaccagcctgaccaacatggtgaaaccccgtctctactaaaaatacaaaaattagccaggtgcggtggcacgtgcctgtaatcccagctactcaggaggctgaggcaggagaatcgcttgaacctgagaggcagtggttgcagtgagctgagatcacaccactgcactccagcctgggagaaagagcaatactccacctcaagaaaaaaaaaatagaggaggaaggaatactttcaaactcattctgagtccagtattacccagataccaaaaccaggcaaagacacattaagaaaactataggtcaatatccctgatgaatattcatgcaaacatcctcaacaaaatactagcaaccgaattcaacaacacatcaaaaagataatttatcatgaccaagtgggatttatcccagggatgcaaggatagtatgtgatacatcatattgacagaatgaaggacaaaaactatatgatcattttaataatgctgaaaatgcatttgatgaaatttgacatccctttatgataaaaaaaaccttcaaaaaaaccgagtataaaaagaatatacctcaacataataaaaagtcatatatgacagacccacaactagtatactgaatggagaaaaacagcctttcctctaaaatctggaacaggacaaagatgcccactgtcaccactgttattcaacttggtacttgaagtcctagttagagcaatcagataagagaaagaaataaagggcatccaaactggaaaggaagaagtcaaattatccttctttgcagatcacatgatcttatatttggggaaaacctaaagacttcacaaaaaaactactagaaccaataaattcagtaaagttgcaggatacgaaatcaacatataaaaatcagtagcatttctttcagaacaaggatcactgggagaaaaaaaataaaaattaaaaagccaaaaatgaatagcatttctatatgctaacagtaaacaatctgaaaaagaaatcaagaaagtcctctttacaatagctacaaataaaatacctaggaattaatttaacctaagaaataagtgaaagatctctacaatgaaaaccataaaccattgatgcaagaaattgaaaaggacaaaaaatggaaagatattccatgttcatggattggaagaataaatattgttaaaatgtgcctactacccaaagcaacctacagattaaatacaattcctatcaaaataccaaggacattcttcacagaaatagaaaaaataatcctgaaatttatatggaaccacaaaagacctggaatagccaaagctatcctgatcaaaaagaacaaaactggagaatcacattacttgacctcagattatactacagagctatagtaaccagaacagcatggtcctggcataaaaacagatacatagaccactggaacagaatagagaacctagaaataaatctatacatttacagtgaactcatttttgacaaaagtgccaagaatgtacattggggaaaggacagtctctttagtaaatggtgctgggaaaactgaatgttcatatgcaggaaaaagaacctagacccctatctctcatcatatacaaaaatcaaatcaaaatgattaaaggtttaaacccaagacctcaagcatgaaactactgaaataaaacattgaggaacgtctccaggacattggagtaggcaaagatttcttaggtaataccccacaagcataggcaatgaaagcaaaaatgaacaaatgggatcacatcaagttaaaaaagaaacaacatagtaaaggaaactgtcaacaaagagacaacccatagaataggagaaaacacttgcaaactatctatctgacaatagattaatatccaggatatataaggagttcaaataactctatagaaaaaaatgtaataatctgattttaaaatgggcaaaagatctgcatagacatttcttaaaataagacatacaaatggcaaacagacatataaaaaagtgctcaacgtcactgatcatcagagaaatgcaaatcaaaactacaatgagatatcatcttacctcaattaaaatagcttttacccaaaagacaggcaataacaaatgctgtgaggatgtagagaaaaaggaacccttgtacactgttagtgggaatgtaaattagtacaaccactatggacaacagtttggaagattctcataaaactgaaaatagagctaccatacaattcagcaatcccacagctgggtgggattggaaatcaatatatcaaagagaaggaaaggaaatcagtatatcaaagagatattttcactcccatatttatttattacaatagcaaacatatggaatcaacctaagtgtccatcgatgatgattggataaagaaaatgtgttatatatacacaatagaatactattcagctataaaaataatgaaattatgtcatttgcaacaacatggatgtaactgaaggtcattatgttaagtgaaataagccaagtgcagaaagacaaacttcacatgttctcacttatttgtgggagctaaaaattgcaacaattgaactcatagagatagagagtagaaggatgattatcaaaggctgagaagggtagagggggtggggaatgggaatggttaatggatataaaaaaaagagaaagaatgaataagacctagtatttgttagcacaacaggctgactatagtaaaaaataatttagttgtacattttaaaataactaaaagagtataattggattgtttgtaacacaaagggtaaatacttgaggtgatgaccccatttaccctgatgtgattattatgcactgcatgcctctttcaaaatatctcatgtaacccataaatatatacacttactatgtacccacaaaattaaaaataaaaaaggaagtaaaaaaatgtaaattttattcatataagtttatgtaaggccaaggcacagtggctcacccctgtaatcctagcagtttgggagactgaggtgggtggattgcctgagctcaggagttcagcctgggcaacacggtgaaaccccgtctctagtaaaataaaaaaaattagccgggtgtggcgcctgtagtcccagctacttgggaggctgaggcaggagaatcacttgaacccaggtagcagagattgcagtgagccgagatcccaccatggcactccagcctgggtgacagagcgagactccatctccaaaaaaaagaaaaaatttatgtagtactagtgtaattttgtaacatggatatatttgcatagtggtgaagacaggactttgagtgtatccatcactggaaaaaagtacattgtattcattaagtaatttctcattgtctcctcccttcccactccccacccttctaagtctccactgtctattatttcacactctatgtttatgtgtgcacattacttagctcccacttatatgtgagaacacgcggtgtttgtctttctatgtctgagttgtttcacttaagattgggcctccacttctattcatattgctgcaaaagatataattttattctttttatggctgaatagtattctattgtgtatatataacacattttctttatccaatcatctattgatggacacttaggttgattccatctgtttgctattgtgaatagtgctgtgataaacatacaagtataggtagctttttgaaataatgatttcttgttttttgggtagatacccaatagtgggattgctggatcaaagggtagttctatttttagttctttgagaaatctctatactgttttccataaagattgtactaatttacatccccatcaacagcatataaacattcccttttctctgcatcctcaccaacatctgttattttttcctctttttaataatagccattctgactggcgtaagatggtatctcattttggctttaatttgcattcctctgatgttagggatgctgaacattttttcatatgcttgttaactattttgtatgtcttcttttgaaaaatatcagctgggcatggtggctcacgcctgtaattcccacactttgggaggccaaggcaggagaattgcttgaggccaggagtttgagactagcctgggcaacatagtgagactctgtctctctctctctttttttttttattttttgagatacagtctcactctgttgcccaggctggagtgcagtggcacaatcccagctcactgcaaccttcggcgcctgggttcaagcgattctcctgcctcagcctcctgagtagctgcgattacaggcacgtgccaccatgcctggctaatttttgtatttttagtagagatggggtttcaccatattggttaggcttgtctcgaactcctgacctcatgatctgctcacctcagcctcccaaagtgctgggattacaggcgtgagccaccacacccggcccaaccctgtctcttaaaaaaaaaaattaactgggtgtcatggcatgtgcctgtaatcccagctactcagaagactgaggcaggtggatctcttgagcccaggaatttgagtgagctaatattgtaccagtgaattctagcttgggtgacagagggagacactgtctctgaaaaaagaaaggaaaggaaagagaaagaagaaagagagaaagaaagaaagaagagtgagagagaaagaaaagaaagaaagaagagagaggaaggaaggaaggaaaagaaaaagaaagagagaaagaaaagaaagaaaggaagggaaaggaaaaggaaaggaaaggaaggaagaaggaaggaagaaagggggagggagggagaaaagaaaggaaggaaggaaaaatgtctatttatgtccttagaccactttttactttttttttttattttttttgagacagagtctctcacccaggctggagtgcagtggcatgatctcagctcactgcaacctctacctcccaggttcaagtgattctcctgcctcagcctcttgagtagctgggattacaggcacctgccaccacacccggctgatttttgtattttaggtagagatggggtttcaccatgttggccagactggtctcaaactcctgacctcaggtgatccgcctacctcggcgtctcaaagtgctgggattacagatgtgagccaccatgtccagcctttaccacttcttaatggggttgtttttgttgttgttgagttgtttgagttccttgtatattctggatattagtgttttgttaatatatagtttgcaattaatttctcccattcttcgggttatttgttcactttattgattatttattttgctgtgcagaagcttttccatttacttaagtcacatttgtctattttgttattgttgcctgtgcttttgaggtcttaatccggcattttttgcctagaccaatgtccagaagagaattccttagatttccttctagtatttttatagttttgggatttacatttaagtacattttgaattgatttttgtatatggagagagatcagggtccagcttcattcttctccgtatggcaatccagtgttcccagcactgtttattgaaaagggtgtccttaccccaatgtatgttcttgttgactttgtaaaaaaccagttggatgtaaatatgtggattttgttctaggttctctattctgtttcatttatttctgtgtatatttttataccagtaacatgctgatttgattgcaatagccttgtagtataacttgaagttaggtaatgtgttgctgtcagaggcattcgaaccagagcgactccattctgagggctaggaaagtgaggctgggaattgctgggcttcattcccagaaagttaggcatacctcgcttctaggtgtttacagttaaaggaacaaattaataatgtttaccaagacccagacttggtagtgtccagatatcccaatatctggagaacaaaggcatttctaattttgctttaaagataataatatcaattcttgcaaaatatagtaattaagaaaattaatcctttatcatggacccttatagcagagcacatctgcccatatatacaagcatcattgtacctagggtggatgcgttcctcctcttacttacagaaacatccaactctttctggggagtagctgttctttcaccactttactttcttaataaacttgcttttactttgcactgcagacttgccttgaactctttcttgcaggaaattcgaaaaccctctcttggggtctggattgggacccctgtcctgtaacattgcctccaactttgttctttttgtttaggattgctttggttattcgggcacttttttggttctatatgaattttaggattgtttttcctaattatgtgaaaactaacattggtattttgataagaattgcattgactctgtagattgctttgggaagtatagtcattttaatgatattaattctttctgaataattaatgaaattaattcttctgatattagttctttccataagcatgaaatgttttttccatttgtttgtgtcatctgtaattctttaatcagtgttttatagattttttctttttgtagaggcctttcacctccttggtgcaatatattcccatgtggggtggggtgttatttggtagctctcgtaagtggtattgctttctcgatttggttctcagctagattgttgttgctgtatagaaacactgctgacttttgtacactgactttgtatcctgaaactcctgaattaatttaactaatctaagagatttttggtggagtcttaagcgtttctagatgtaagattatatatcactgaacaggaataatttgacttcctcttttccaatttgcatgtcttttatttctttctcttgcctgattgctctggccaagacttcctatactagggttgaataagagtggtgaaagtaggcatccttaatcttgttctagtttttatcattcaactatttccccattcagtatgatgttggctgtgtgtttatcatgtgtggcttttattattttgagatatgttcattctgtacctagttttttgagcttttatcatgaaggatgctgaattttatcaagtgtgttttctaaatctattgagatgatcatatggtttttattcttcattctgtttttgtgatgtgttacatatattaacttgtgtgtgttggaccatttttgcattcctggtataaaacctactttatcatgctgtattatctttttaatgtgcggttggattcagtttgctagtgttttgttggggattttcacatccgtgttcatcggggatattggtctgtagttttgttgttgtgtccttgtctgtttttggtattaggatgttactggcctcatagaatgagttagggagatttcccttgtctgtgatttttagggacagtttcaggattattagtatagttctttttgtatgtttggtataatttttttaatgttgatttttaaatttttatttttttacttagagatgggatcttgttatgttggccagggtggtctcaaactcctggcctcaagcaatcctcctgtctcaggctccacagtgctatgattacaggcatgagccaccacatctggcctatttggtacaattttggtataaatctgtctggcccagagctttcatttttgggaatttttttattgctgattcaatattgctacttattattggtctattcaggatatctgtttcttcttggttcaatcctgggaggttatacgtttcaaaaaaacctataggttttctaggttgtgagcatatagttgttcatagtagtctctgatggtatttctgtggtattggtgtaatgtcttctttttcaattctggttttgttcatttgaatcttcttttttttcttggttagtctagccagcagtttattacttttgttgatattttcaaagaaccaactttttgtttcgtttatcatttgtgttgttttttagtcttgattttgtttaattctgctctgatctttgttatttcttttctgccaactttggatttgttttgttcttgttttcctagttccatggggtaccatgttaggttgttaatttgttacttttttgacagaggcatataattctataaacttccctcttagcatgacttttcctatatcccagaggttttgatatgttgtgttgccatttttgttcatttcaaacaaaatttttattttctgtttttatttcttctttgactcagagatcattcaggagcacattgtttaatttccatgtatttatacagttttcaaagttcctcttggtattgatttttagttttattcagcagtctgagaagatgcttgaaatgattttgactttaaaatttgtcgagactagttttgtggcctaacatatggtctaccttggagaatgtttcacgtactgatgagaagaatgtatattctgcagttgttgggttctgtaaacgtctgttagctccatttggtccaaagtccaacttaagtccaatttttttgttgattgtctgtcttgatgatatatctactactgtgtgtgaggtgctgaagtcccatactattattgtattgctatctatatctttctttaggtctagaaatatttgctttattaatttggcctctccaatgttggatgcatatatatttagtattactatattatcttgctgaattgattctgttatcagtatctcatgatcttctttgtctttttgtactgttttttatttaaagtctattttatctgatacaactatcacaactcttgctgaagcacagtggcgagatcataggtcactgaagcttcaaactcctgggctcaagatcttcccacctcagcctcccgagtagctgggactacaggttcaggacaccacgcactgctaatttttaaatttttagtacagacgaggtgtggctccgttttccaggatgatgaactcctgggttcaagcagtcctcccgcttcagcctccaaaagggttgggattataggcgtgagcccccgcaccctgcctgcaagtcttttaattcacttcaattatcttagaattttccttccccactttatacatacgtacagtggaactgagggtgtttgtctcaggtaaccgatcaatgaagtgaataacctgtagggggcagcagagcctaaggccagtgacaccctgctgaggccagtctggagccggcaaagggagggaaagggagctcccctgggtgtttcccgggcagcctgccctctactgcaggtggcctccagctgctcagaacagctgcggaaggaatgtggatcctgagaagctacagagccctggaaagcaggagactcacgtgcaggtgcactttgtgtaggggggttggggggaggttctgtccttactggggctgtacctagagcctagggacgttttgcgggggcagtgtttggtttttacgtgcaaagggtcccggcgacagactgtaatttgtacatacaaagataatctgtgaagatcaggctcagtaagatttgtctgacatgtcacctggagaaagggtttgtgaaggtaatagtttacttaggttagaagcttaaactgaccccaggtgagaacttctgctggtgaaaatgaagtctagggggaggaagcggttccatattcaggggtgggacggggggagtgtgaggaagtctcatccccaattcccgccctgtagaggacacctgcctctccctcctggtgcagtcttgcctggcctggcctggcctggatttccttcctgctatgaggcaaaggaatgactccattgaacaccgagtctggaattcccagcacacatttctgaaagatcgaggaagctaacagtgccccttctaacaataagtagcaagtttggctgaaatgcagatagccaacgaccagggcgcagggagtgagcttagccttagaaaggctgtagctaggattaatcagccgggctctgcagggctccgttacccagggcttaccctgtcactcagggctgaggggcggagcctggaaccccatccaatcaggggccctgggacggggccctgccaactgtcaatccggggaagcagaaggccgcactcagagtctctgcactcctttgttgctggggtccgttgcgttctgcatccagtccttgctgctccgagaggccccaggtgcctccgccacggctcctgtgacgctgtcacctgcgctgtgacctgctccggagtcataaagaggacgccgggacaccaagaagcagggaaatggtaaagtgcccggcctagcgtccagatacgtggaagaggggctgggtggaaccaacaggatcctgctgtggcgggacccaggcctccgctcgggcgaccccggcgattgggacccgcgtcccccatggcgtggcttggccctcggtccgctcggccgccaggtggggctgggcccgcagctgggaccccgggcgtcctgtcccgtccctacgcggcgactgcggccccggccccggagtcctctctgggcagctccgcgcccgcagcccggcgtcttcccagattgtgcgggggccacgggagggtcatggggggtcggatgtgtcccgcctttcttctgctaaaaattaaactgaggctctgttaacagttaaagagtttgttggagcaacagcgattccgagtgagaaacacccggtcatggcttgtgattgaagaaaaggcttttataagttgcatgaggaggcaaacaggattaaatacttgattagttacagtgatgctgtcgccgtatgtggacttgtcaacctgaaataaaagaatcagattccagttttttaaagtttactcaagcaagaagctgggaatggcccatttgggaaaacacaggatccacggaaatgggctcagtgtttcaaatttaaaagtttaagttcttgcttatataggcaagaaatttaacaggattacaacgttttttatacaaggctagtttgtgaggcacaacaatttaatcagagtttggcccgcccccctccccccgcccccatagagcttttttttttttttctttacatttgggtttcatttcctttccaatttaaaagagtatatttaacattccagcgtaaggcaaggtgatgccagcgtggacaacatggcgagaccccgtctgtacaaaatattttaaaaaattagtcgggtatggccgggcgcggtggctcacgtctacaatcccagcactttgggaggccgaggcgggcggatgacgaggtcaggaattcgagaccatcctggccaacatggtgaaaccccgactctaccaaaaatacaaaaattagctgggcgtggtggcacgtgcctgtaatccggctactcgggaggctgaggcaagacaatcgcttgaacgcaggaggcggaggttgcgtgagccgagatggtgccactgcactccagcctggcgacagagcgagactctgttaaaaaaaaaaaaaattagtcaggtatgatggccgcttctgtagttagtctggaggctgaggcaggagaattgcttgagcccaggaggtgaaggctgcatcaacgacagtattgaatttacagctaataggcaaggtgagggagaggatggaagttggtttagtgtcaagaattagggaagagattgtcaaacgtagggaaaagggacttgattggatatcaggtttgggggaattttctctaaactcccttagaagggtttttgctaccacagggctctgcaggaaaaggccaaagtctactcaagaagaggggggctctgaggagcctgactagtttgatcaaagagggagtttttgggacccctctcccagcctagttcttcccaggtatgacagtaaatccctaaatttctggttttctcctcacattcaaaaacaccaacttcccctcgccaattgacatccttatcaattatgtgtttcccatgctacatttgaaacagctgccatattttatcatttttccacagacaaatgaatagcactatttaaaaatgttatcaacacctctgaaaataaggaaaactttttttttttttttttttttgagacagtctcactgtgtctgttgcccaggctggagtgcaatggtgctatcttggctcactgcaacctcggcctcctgggttcaagcgattcccctgcctcagcctcccaagtagctgggattacaggcatgtgccgacatgcccggcagatttttgtatttttagtagagacacgggaaagaaaacattttttaaaaattttagtccaggcacagtgactcactcctgtaatcccagcactttcagaggcccaggtgggaggattgcttgagcctaggagttcaagaccagagtgggcagggcaacatagcaagatctcatctctactgaaaacaaccaaacaaaatagctgggcatggtgtcatattcctgtagtctcagctactatactcgggagactaaggcgggaggatcgcttgagccccgaagatccaaggctgcagtgagccttgagggcaccactgcactccagcctgggagacagggtgaaaattttcctcaaaaaaacaaaaactttagggcttggcatgctggcttacacctgtaatcccagcactttggcaggccgaggtgggaggatcacttgagtccagaagtttaagaccagctcagcaacatagagagaccccgtctctattaaataaataaataaaattttaaaaagaaaaaaattatattttgtttatgaatattttttatgagaggaaactattcagtaactacccaaaatgacattgggtaaaactccatggctgattcttgacattgatcatcttttcatgtgtttgttggccatttgtgtatgtctgggagaaatgtcattaaaatccattgcttggctggatgtggtggctcatgcctataatctcagcactttgggaggctgaggcgggtggatcatgaggtcaggagttcaagaccagcctggccaacatagtgaaaccctgtctttactaaaaatacaaaaattagctgggcatggtggtgcatgcctatagtcccagctactcaggaggctgaggcaggagaattgcttgaacctgggaggcggaggttgcagtgaaccaagatcgcgccattgcccatattttagtcaattagttttcctttttggtacaataatttttctagttaattacaataagaaaaaccttaaaaattttactagctcaagcattttaagtgtaccattgagttagtttgacaattttatataacttctctaagatgagtcatactgcatttttctttttctgactggtcttttgcagttagcttagtatcatgaagtttcatgcctgttgtagtatgggacaggatgtcattttataagaataaataatatcctgttgtatatatatatacattttcattatccattcatccattgattggcatttaggttgatctacctgttgggtgttgtgaacaatggatttcaattcattttattttattttttatagagattggatctcactctgttgcctaggctggtctcaaattcctgggctcaattgatcttcctgcctcagcctcctgaaagtgttggggttacaggcatcagccactgtacccagccatcgatggttttcaaatatttctttgagatcctacttttaattcttttgaattgaatataattcgacctaaaagtgggttgctggaacatttggtaattttgtttttaatttttgaggcactgccatactgtttttcatagctaagccattttacaatcccttggacagtgtacataggttccagtttgtcagcatgctcatcaaagctttccatttggcatgtttgatgtgttttttatagttgaattatggaaattctttatatttgctgaaaattaagaccataccagatatatgacttaccaacattttctccaaattgatgagttttcttttcccttgttgatagtgtgttcccttgcacaaaagttcttaattttcataaatcacattacctttttgttaagactgccccctcacagagtttttacctctaaaccttgtccccattcagccttcagcacttcatcaattacaatttatgttgtcttaccccagtattatttcccataatggttttggtcatgggtttctgtttcagttagttatgactctcttaatcagttgggttggtgagatcccatgcaaaattcggtttttgtttgtttttggatttgcctgtgctgtttgaatgagaatcaaatccactttccagataccatcaaaggttaaactttgtgaacacacattttcaagtatatgtagtctcaggactgctgttgtgagctttttctctgcacatgaattagtaggactctgttacaaaagatgctacacacccaatgtacagagagacattggggtacctaggaaacacatctttctctccggattcaccaaaaagagacattttcctattctttttttttttttttttccaagatggactctcactctgttgtccaggctggagtgcagtggctctctcttggctcactgcaacctctgcctcctgggttcaagtgattctcatgcctcagcctccctgagtagctgggattacaggcgcctgccaccacacccggctaatttttgtatttttagtagagatggggttttgccacattggccagcctggttttgaactcctaatctcaggtgatctgcctgtcttggcctcccaaagtgctgggattacaggcgtgagctaccatacctggccataaatttgttattttggaataattttagatttatagaaaacttgcaaagataatctacaaagttcccatatacccgtcacccattttcttctaatgtgagcatcttacataaccatggtccaacaaaactaagaagttatcatttgtatattactattaatgaaattccagattttcaacagtttttccactaatatcctttttctattccaggacccaatccagtataccccactgtatttagttctcatgtctccttgatctgctttgtgacaatttctcagtcttcccttgttttttaaaatcactttgacagttttaagagtgctggtcaggtattccatagaatgttcctcaatttggaatttttctcatgattagactggagttaggtgttttgcaggagaatgccacaaaggtgaagtgtccaggctcatcacttgatacacctggtgacagtaaccttgatcacttgattgaagcagtgtttgtcaggtttctccactttaaagttactatttttacccctttccatactctgttctttggaagtgagtcactaagtccagcacaggtccaagggaggagggccaattcagctccatagttctggaggctgggaagtctaagatcaaggcacgccaggcacggtggcttacgcctgtaatcccaacactttgggaggccaaggtgggcagatgacgagatcaggagtttgagaccagcctgaccaacatggtgaaaccccgtctctactaaaaatacaaaaattagctgggcatggtggtgcgtgcctgtaatcccagctactcaggaggctgaggcaggagaactgcttgaacccgggaggcagaggttgcagtgagccaagatcgcgccactgcactccagcctgggtgacagagtgaggccccatctcagacaaaaaaaaaaaaaaaaaaaaaaaagatcaaggcactggcaggtaccatgtccagagggtccattcctcatgaactccatcctcttgctgtgtcctcacgtggcagaaggctacattttcctattctgctgttgctttacccatagttacactctggcatcaaagttgctgtttgagaggaagtgagtgtagacaggggagtaagaggtctgatgacagaggcagggaataaatgtttggagtccacagcatcatgagaacttcttgggaatagagtctaggcccccagtgctgtcactctcacccatcctcctctacacatgtgagatgtttcaggacccagtggcctttgaggatgtggctgtgaacttcacccaggaggagtgggccttgttgaatcctttccagaagatctctacagagatgtgatgcaggaaaccttcacgaacctcatctgtataggtaggggtgacaatattacctccctcagtgaattgtagaacatatgtttctagttcatcagtgctattcagggatttggaatatggataggcaatccttcgatgaacaaatcaggcatggctgcagtgtcccataaacatggaatctaatgatttttaaataatcttatactaattcaggactattttttagggaaaaaatggaaagaccagaacattgaagatcaatacaaacatcccaggagaaatctaagataatttacactcacaagacaaagaaatgtctctaaagaaaatctcagattgtcagaaattgttaaaaagaagccaacaaaagaaataagctcagcataaaatgtatttattcttagaaagttttctcgaaaaacatatatttcaatgtgatatagaggtttaatgttcataaaatagcttacttggaaatagtattaagaaacctcagctggccgtggtggctcacgcctgtaatcccaggactttgggaggccaaggtgggcggatcacctgaggtcgggagttcaagaccagtctgaccaacatggacaaaccctgtcgctagtaaaagtataaaattatccaggcgtggtggcacatgcctgtaatcccagctactcgggaggttgaggcagaagagtcgcttgaatccgggaggtggaggttgcagtgagctgagatcacgccatggcactccagcctgggcaacaagagcaaaactccgtctcaaaaaaaaaaaaaaaaaaaaaagaaacctcatgtaaatattctttttttgatgatagatatagacaggccatcttgtagaatgtgtgatccattcatgtttaaacaattcagacagggcagaaagtctacacttcatgggataatgttaaaaatgcagctggacatggtggctcatgcctgtaatcccagcactttgggagaccaaggcaagaggaccacttgaggtcaagagcccaagatcagcctgggagacacagcaagactctatctctaccaaaaataaaaaattagctgggtatggtggcacacacctgtagtccaactttctggggagtctgaggtgggaggatcacttgagcccaggcggtgaaggctgcagtgtgttatgatcacaccactgcactccagcctgggtaacagagtgagactttgtaccaaaaaaacaaaaacattaaaaatgcaagtgtaatacttattaacaaatattaaatcgcttataaacagacccttaattatgtgcttggcatttttcacagaaattttatgggagagagactctttgagagtgcagaaggtagtcagtgtggagaaactttcacccaggttccggaagacatgctgaacaagaaaactcttcctggagtaaaatcatgtgaaagtggtacatgtggagaaatcttcatgggatattcatcctttaataggaacatcagaactgacactggacaccaaccacataagtgtcagaaatttttagagaagccatataaacataaacaacgtaggaaagccttgagccatagccactgctttcgaacacatgaaaggcctcacactagagagaaaccttttgattgtaaggaatgtgaaaaatctttcatttctcctgcaagcattcgaagatatatggtaacgcacagtggagatggaccttataaatgtaagttttgtgggaaagccttggattgtctcagtttataccttacccatgaacgaactcacactggagagaaacgatatgaatgtaaacaatgtggtaaagccttcagttggcacagttctgttcgaatccatgaaagaactcacactggggagaagccatatgaatgtaaggagtgtgggaaatcattcaatttttccagttcctttcgcagacatgaaaggacacacacaggagagaagccgtacaaatgtaaggaatgtgggaaagccttcaattgtcccagttcttttcacaggcatgaaaggactcacacaggagaaaaaccctatgaatgtaaactatatgggaaagcattatctcgccttataagctttcgaagacacatgagaatgcacactggagagaggcctcataaatgtaagatatgtgggaaagccttttactctcccagttcatttcaaaggcatgaaagaagtcacactggagagaaaccctacaaatgcaagcaatgtgggaaagccttcacttgttccacttcgtttcaatatcatgaaaggactcacactggagagaaacccgatgggtgtaagcaatgtgggaaagccttcagatctgccaagtacattcgaatacatggaaggactcacactggtgagaaaccctatgaatgtaagcaatgtgggaaagcatttcattgtgtcagctcctttcatagacatgaaaggactcacgctggagaaaaaccttatgaatgtaagcattgtgggaaagccttcacttgttccatatatattagaatacatgaaagaattcacactggagagaaaccttaccaatgtaaggaatgtgggaaagccttcattcgttccagttactgtcgaaaacatgaaagaactcacactattaatatatgagagaaatgctattttttaatttttattttaatagagacagggtctcactatcttgtccaggttggtcttgaactcctggcctcaagcatccctcccagcttgaagtgtcaataaaggaaggcaataaaatgtagagatggagttaggtgatgccacgctgggattcactggtggcctatcttacatatgatttcgaaggcagacatgaggaaggccttagtcacattttagagccagccaaattcacatgggctgtgtggccccctgattctagcccattttcctgattctctggcttgtcaatcaagagtatcctccaaatctcttgactttccttttttcagaggtgtaggtttccaaagatgtccccagaagctccacattcaagttctatctacagtttggtttttctttaagtattgtaatgtacataccagagagataatgcagactgtcatgggtggggaatgttctctgatgctcaactcccctagtctgcagattgagttggtaggaggtgtgatttgtttacatgcacctttgttcctgctggtagtgaccttgttcttgattcagcctgacagctactatgctgccatcagaaccaacttgatgagagctctgctgccctgtgcagtgactggtctcatccaggactctcatgtgagaaggaacaccttgctctggtcaggaaatgtccagtgtttcctgttatccacaggagaatgtaatgcctcagttcattttcagttatctttgattatatgtgattgacaatgtgtatttttgagggagcaaagatttctgtacatatttcttaaaaatagtttattcagctgggtgcagtggctcatgcctgtaaccccagcactttgggaggccgaggtgggcggatcacgaggtcaggagtttgagactagcctggccaacacagtgaaaccccatctctactaaaagtaccaaagttagccgggtgtggtggtggatacctgtaatcccagctactcgggaggctgaggcaggagaatctcctgaacctgggaggtggaggttgcagtgagccaagatcacgccactgtactccagcctggacaagagagcaatactctgtctcaaaaaaaaaaaaaaaggtttattcactgtttttcagttgtgtacttgcaaatgtttttctcttttttttgtatactgagaagctctattaaaatatcccttgtcaacatggatcagatcaaatgtatactgttaccaaattatttgtttgatattgtgaatcaatatcaccatgtgtataaacctcatttatttcctgatgtaaattatacatttcatgcatatctacttataatttttacctttttttttttgagacagggtcttgccttttaacccaggctggagtgcagtggtgcaatcatagctcattgcagctctgagctcctgggcttaagtaatcctcctgcctcagcctcctgagtcgctgggactacaggtgtgcaccatcatgcctggctaatttttttttaatttttagtactgaggaggtcttgttatgctccccaggctagtctccaactcctgggccaaagcaatcctcctgtctcagtcttccaaagtgctgagattataggcgtgagccactgttcccagccacaatttttatcttgaccataatttgtcattcttttataatccccgaagttaaatcttgctgttatggtgctgtgttgcccaaaaccaccagtactaaaaaaactgttgtcaaagaggatgtaataaattgtagtaataaatatgaccacaagccataaatgactgcaggacataccaataagagggttctctgtagaatttcttacaggatttctgttttaggtgcattgttctctattcaaggaggtgagtcatttttgtatattggatgctgtcaggatgtgaacttaattgtaccactgctaatcatagtagttctcacctagaaggagaaagaatggattggaggtaaacctaattgaagacaattgctggtcagtccattatgagaagaggggaactggaatttttggttatttttatgatttgaaatatgttttcttctatcccatctagggacgtggttacagaatgccctcgtttttgtcctgctccatcatggtcactgaggagcactgcttcacactgcaggtgtctgacatggcttaagatttggccttgtggtgaggggaggcagctcccagacttgtggacctgtttttgctttacttattctccaaaacctaagatatttcttagagtgtatgaacactgttccacaaaatgctccagttaaaaatatataaaatcacttactccttaggaagctgtataatacttttaaagaaattccttactgagtcaagtgtggtcaatatatttatgtaactgtctgaatgcacgcctaggaaggatgaaagtcagtatcactattccaaccaagcctttcttgctcagataatatgctcttgatgcacccctcttttttctttttgacacagggtctcattctatcacccaggctatgtggagtgcagtggcgtgatctcggctcactgcaatctccacctcctgggctcaagcgatcctcccaccttagcctcccaagtagctgggaccatgcccagctaatttttgtatttttttttttagagacaaggtttcaccatgttgcccaggctgatctcgaacaggagttcagcaacccttttatgccacactgtagagtaataggcaacatggaaaagttagttttatatattatgcagtggcatggaccaatccaatcacttttttgaagtgccagccaaactcttcttcagagaagcctgtttgaaaccccctagagtcaaaacctggtaccacaggacagagcagcaatgagtgaccaacccctgactctatgtgcagatgacacatccatccccagattaggtatcaacataagtgaaaggtactgtcattgcctgtcattttttttttttttgagatggagtctcactttgtcacccaggctggagtgcagtggcacgatcttggctcactgcaacctctgcctcctgggttcaagctattgtcctgcctcagcctcccaagtagctgggattacaggtgcccgccaccacacccggctaatttttgtatttttagtagagacggcgtttcaccatgttggccaggctagtcttgaactcctgaccttgtgatccacctgcctcggcctcccaaagtgctgggattacaggcgtgagctactgcacccagcccattgcctatcagtttttatagagtgtcgcttagatcaagaaagagatggtaatacagagttaggtgtgtctgaaaccaaacacgacctcatccttctcccttgaaggccaaatgcactctgagagtttggttagagtacaaacaacgccaccaacttcactccagatgtgattttctacaggaggcgggcactgtgttgggatggccagtgaaggtaaggaacactagaggtgcaggtttaggtgatgaacaggacacagcctggacattattagccttgactatggaggtgtcttgatgtttctcaaattgagaccagtctggccaacaggatactgaactggttttcgatggaaaaattcatctgtatagggatctattcgcttcctttaagtttcagtttcgttatgtggcatttagcatgagtgactccattttggtctgatctggtttctaagtgcctagtgcagaagctcagtccaaaacaatggcctcccataatgttcattttaacattttctttatactaatacattatatcaggtcacctcaaatgtcacctccacagagggttcttcctctcacctcagttagtcctacttctttccattcagttttttgttacactgcactttttaggatctgggaaatctaatcaaagttcacagggtttattgcttattctttttctttttctttttctttttttgagacagagtctctctttgtcgctgcccaggctggagtgcaatggtgtgatctcggctcattgcaacctccaccttccaggttcaagcgattctcctgcttcagcctccttagtagctgggattacaggcatgcaccaccacactcagctaatttttgtatttttagtagagatggggtttcaccatgttggctaggctggtctcgaactcccaacctcaggtgatccactcacctcagcctcccaaagtgctgggattacaggcatgaccactatgcccagccaggttcattactttttaaaaatcaatctatgaaaaattaaattggccaggcatggtgcctcagaacctgtaatcccagcactttaggaagctaaagtgggagggtcacttgaggccaggagttggagagcagtctgggcaacacagtgaaaccccatctgtacaaaaaatacaaaaattcgctgggcttggtggcgcacacctgtggtcccaggctctacttgggaggctgaggtgggagaattgcttgagtccggaagatcaaggctgcagtgagctctgtttgcaccactgtactccagcctgggtgacagagggagaccttgtaaaaaaaaaaaaagaaagaaagaaagaaagaaagaaagaaagagagagagagagagggagagagagaaagaaagaaagaaagaaagaaagaaagaaagaaagaaagaaagaaagaaagaaagaaagaaagaaagaagaaaagaaaagaaaaatcatgtaaatgaaaccaaattcagtgatgttaccttaactttttttcttttttcgggtagagacagggtcccactatgttgcccaggctggtctcaaactcctggcctcaagcgatcctcctaccttggccttccaaaatgctggtattactggtgtgagccaccacacctgtcctacctttatttctaataactgatatgccttacattaaaaagtcttttagaaaacacctttgagccattttccagataggggaagtcaatgaagctccctcttgtggtgagggcgactttaacatccacacatcctgtctgggggactggatttctgagttgtgctgagacttaagagtggaaaaaaagtctactctttttcctctgctctcacacaacacggaatacttctgtgaccaaatgcaaatatttgagaagtgtcccccacatgccaagcaaagcatcaattctgcaactgactccagctcgatgtcttctagttccaacactttctacctttacataaggtacaaaactgcctcagaaatcatctgaccatgtgtcccggtttgccagtgataatccttgatagtacctgttgtcccaacatagtttttcatagcacctcatcttgccatggttatctgtgtctgaacaatgaatatgtatgaatactttcacacataagcaaaattaggtttattaaatgaagtttccaggaatgttcaaatttcaacacctgatttaccttatcacaagttatggctgtgctaatttctccaggaaatattcacagaatattgaatttatcattgtaaggtgtggagcaatgaagatgcccaagaggccaggcgcacacctgtaatcccaacactttgggaggctgaggctggaggatcacttaagctcaggagtttgagatcaacctgaacaaccgaatgagacctcatctctaccaaaaataaaaaactagccaggcatggtggcaggcacttgtagtcccacctacttaggaggctgaggtgggaggattgcttgagtctgggaggttgaggctgcattgagtagccatcgcaccactgcactccagcttgggcgacagagtgagaccccgtctcaaaaaaagatggctaaaacataatttttttttttttgagatggagtctcactgtgtctcaggctggaatgcagtggcacgatcttggctcactgcaaactctgcctcccggttcaagcaattctcctgcctcagcctttcaagtagctgggattacaggcatgcgccaccattcctggctaatttttgtatttttagtagagataggatttcaccatgttggccaggctggtcttgaactcctgacctcgtgatccacctgcctcagcctctcaaagtgctgggattacaggcatgagccaccgcgcccggcctgcctaaatcataatttctatgacagaatttctcatttacagcttcccctgagaccatctttcatttcagttaaccctgctccttgggggttatatgtgagataaaagtgccatgctatatcatgttccctggctcagtcctacacagcatgtcctgaaaaatgggtcttcagtcactgtcaatgcaccagggatagatatacatagtactgagagcctctaaatctttaataagttctggcttggttagctcccttacaaggaaaaccttgctggagtccatagcagtgtgaggaagccttggccatgcctcatcccatttcccgcacgctggaagacatctgcctctctctcctggtgcagtcgtgccttgcctggtctgggctcccctcctgctctgaggcaagcgtatctctccattgaacactgagtctgaaatgccctgcacacacttgtgatcccgtgcagaaggaaggagcagggacagccccttgaatgaggaagctaacagtgcctcttctaacaataaggagcaagtcgccttgaaatgcaaatatctgatgaccagggctcaaggaaggcgctcgcttagagaggctgttcgcttagagaggctgctcgcttagagaggctgctcgctcagagacgctgtggccagaacaagtcagacatgatctgcaggacccggttacccagggcttctgctgtcactcagcacggaggaggcggggcctggcgccccatccaatcaggggtgctggggcggggccctgtcaactgtccatccggggaagggggaagggacagtcgccctccgtccattcctttagtgctgcgccgacagcggtcaggatctcggctttcttgcttcgagagggactaggtgcctccaccagagcttctgtcgctctgtaacctgcactgtgacctacactagtcgcgggagccacgcagaggacgccggaacaccctggaagccgagaaatggtgtgtgtgagggggctggcgtccgggcgactgggagaggggctggaatcggccggaaccggctgaggcgggacccgggcctccacgcggcgactccggggtcgtggacgcgagtcccctcggtcgcagggtggggctgggccggcagccgggaccccgggcctcctgtcccgtcccttcacggcgactgcggccccggctccggagcctaatctgggcagctccgcgtctccccacattatgcgggggccacgggagggatatggggggatcccgcctcggatatggggtttgttagaaacaagtgcccggtgccgcaaagaaaaccagcatctaggcagaaaattcctcagcaaagcaaatttatttctacacaagggtgcagcttgcgccagtcacaagagcacagcgagcggggtagggcaggggtttttctccttaacgcagtttctagcacttctgtgtcctttcctcattggctagggttggacctcacaatctaaactaactcgataggctaaggtttaaaattaaatagggtctggccaggcgcggtgggtcacgcctgtaaccccagcactttgggaggccgaggcaggcggatcgcgaggtcaggagatcgagaccatccctggctaacacggtgaaaccccgtctccactaaaaatacaaaaaaattaactgggtatggtggcgggcgcctgtagttccagctactcgggaggctgaggcaggagaatggcgtgaacccgggaggtggagcttgcagtgagccgagatcgcaccactgtactccagcctgggcaacagagcgagacaactgggcaactccgtcacacacacacacacacacacacacacacacacacacacacaaattaaatagggtctatgagacgggaaggaacagggactgtccgttactaggcgggaaggcgtatctggacttgtctgggcgcggcaaaagcgggaaggttgtttacagaacaggtagctaggagacaaggaagtcggtctcaagaaacaaagaacagcttactaaagcttttagaaaagtaatttatcatctctgacaggttcgtgtgggaggagtagcggtctttggggtccccagtgcccacttttttctgttaaaaattaaactgaggtacgttaacaattaaagagtttagggccgggcgcggtggctcacgcctgtaatcccagcactttgggaggccgaggcgggcggatcaggaagtcaggagttcaagaccagcctggccaacatggtgaaaccccatctctactaaaaatacaaaaattagctgggcatggtggcgcgtgcctgtaatcccagctacttgagaggctgaggcagaagaattgcttgaacccaggaggcggcggttgcagtcagccaagacggcgtcactccagcctggcaacagagccagactccatctcaaaacaacaacaacgattcacgaatgagaaacacccagtcctggcttgtggtttgtcaacggaaaaagccaagctatgtaaaataaagaagtttattaggagccgaataggagagccgttggccgagggaaacacaaccccaagcagcctggagtaagtggtcccgaggcagctcaagacagtttggttttattcatttcagagagacaggaattgcagggaaaatcatgaatcagtgcctggaaggtgtaagttccattggcagaaagggtgggacctgtggaaggggggttagaaggcacaggtagttgagggattctgtaggtggcagctggttgagagtgttgaatctttgtctaaagtttggaggaggtaggaaggaatgctgaaggaagggggtctgttatctgccacttcattccatcccagccaaaaaacagacctgtttctcgagattttatgaattctaaggcgtaactttacctttgccttgcgtggccttaggtcttgtttgtaatttggtatcttgttgccacaaggagtctgtttttccagtcagataatgtctgtttttacatgaatgtgcgtcagttgctgcatgtaaactcctaaagggagagggtataaggagacctgtctcacctcccatcctgtcatacagaggcactcaattttcagggttttttgggggttcccttggccaagagccagtcacttcacttagctgggaaggtactttgtttttgtttttgtttgagacagagtctcctgtagcccagggtggtgtgcagtggctctatcttggctcactgcaacctccaccttccgggttcaagcgattctcctgcctcagcttcccgagtggctgggattacaggcatgtgccaccacacccggctaatttttgtatttttagtagagatggggtttcaccatgttggccaggctgttcctgaactcctgacctcaagtgatccactggcctcggcctcccaaaatgctgggattacatgtgtgagccacctcaccaggccagaaggtatgtttttatttttagtttacaggttgaaggctggacttttataaggtacatgaggagacaaaccagataaatgcttgattggttgcagagatgcagtcaccttatttggacttgtcaacccgaaataatcgaaagtttcagatttcaactggaagagtttattcaagcaaaaagatagcaatggcccatttgggaaaaacacagactccagagaaatggactcagtactccaaaattggaagttaagttcttgcttatattactgggaaaagaggtcctgatcagatcccaagagagttcttggatctcatacaggaaggaattcaagacgagtcggaaagtacagtgcaaagagagtttattgaaagctactctgggccagcatgatggcttaggcctgtaatctaagcactttgggaggccgaggtgggaggatcacttgaggtcaggagtttgagaccagcctgggcaatatagtgaaaccccatctcttccaaaaataacaaaaattagccgggtgtggtggcctgcacctgtagtcccaggtactcgggaggctggatgggacaatcacttgaacccgggaggcagaggttgcagcccagctgaggacacgccactgcactccagcttgggtaacagagtgagaccccatctcaaaaaacaaaaacaaaacaaacaaacaagacagagttcaagaccaacgtggccaacacagtgagaccctgtctctatttaaaaaaaaaaaaggaaagaaagaaagaaagcctctcttacagagtagggcatcctcctaaagcaagtggaggaacgtactgtctaagtttttcttatgtagggatcttgtctatgtaaaagactaaactgagctgtgcctacgtgcatgtgggctgacagcgtcacaaaatttattactctgttgatttaaagaaaactatcctttacattttagtgcatacaagtgcattaaaacataactataattatcaggccaggtgtggtggctcacgcctgtaatcccagcactttgggaggccgaggtgggcggatcacttgagattaggggttcgataccagcctgatgaaaccctgtctgtactaaaaatacaaaaaaaaattaactgggcatggtggcatgtgcctgtgatcccagctactcgggaggctgagacaagagaattgcttgaacttgggaggtggaggtgcagtgagccgtgattgtgccattgcactccagcctgggcaacaagagtgaaactctgtctcaaaaaaaaaccaaaacgaaacaaacaaaaaaaactataattatcttgaaagcacatattattatgggtattgggacatcaggacattctgttgttgtgggagtgtaaggatacttgcaggcatcttcaggctgtctccttcatgggaaacattttgtgatcatgggttgcgactggcaaggagtgtttcttgttagtctcaagatggagctgaacttaaattggtgtgttactctggctcccctaggcacctgcttccctaacacttatataggcgaaaggcaaataaatataacaggattacattttccatagaaggctgatgtatgaggtacaacaatttaattattattattattattattatagacaatatcttgctctgtggcccaggctggagcagtggtgcgatcatggcttactgcaaccttgacctccccggctcaagcacctccgcctcccaagtagctgagactatagtcgcccaccagcacacctggctaattttttattttttacagaggtggggtcccaatacattgctcaggctggtctctagctcctggcctcaaacagtcttccttctttggcttccaaaatagctgagattacaggcgtgagccactgcacctggctaacaacctaattcattatggttttttttcccccagagcttgttttctttaaagctcgtttttatttccttttcaatttaagagtgaatttaacattccagctgaagacagtgtgatagccatgaagtctttgtgtgagaaagttaagagggaagttagtctactacagagatcagtagtgaagagaggccctgtgggatggctcacacctgtaaccccagcactttgggaggccaaggcaggtggatggcttgatctcaggagttcaagaccagcctgggcaacatagtgagaccctcccccccatctcaattatgaaaaatcatattaaattttaaaaaaatagtgatgagggaaagggtctttcctgttttccctcagtcatttacaacattttacaaaacagtataggtaagaaagaaggcgaatctgtaatcagggaaaggagggttccaactggctatgtaaaagctgtgtgtcaggtgactcaactccatgatcacattgcttaaagataatttagagattaaattttttaattacttgtgttttgtttgtttgtttttttgattttttttgagacacaatcttactctgtcacccaggctggagcgcggtggcaccatctgggcccaccgcagcctctgcctcctgggttaaagtaattctcctgcctcagcctcccaagtatctgggattacaggtgcgtaccaccacacttggctaatttttatattattagtaaaggtgggggtttcaccatgttggccaggctggcctcgaactcctggcctcaagtgatccgttcgccttggccttccaaagtgttgggattacaggagtgagccaccatgcctggcctgacttacttgttcacacagcctatataggtagaagatttctagtcatgtaatcacaggttaattggtggattatgcctgattaagcataaatttcatttccctataaattagtaattttcaagtgttttatttaaatttgattttagtgtccttaggtaggaccttagaatactacacacagtttggtctcattgcttcttatttaaattttttcacactttccagggtgagtggtttcccactacaatttccaaatatacgggatgcagggcctcaaatcctccaccctcataccacagcctgactcttcaagggcttgcagtgaaatctgtgtctgaacatttcacatgagaggaaagcagagaataaccactagacattttcccgagaaaacctttctgcctctcctccttttatctttcctagacacagtcacctatcaggatgtctttgggatgaggttcctttgtggaaactttacagggtgatgtgtcttccatacaccctcgtatcctttttgtttgtttgtttttgagacagagtctcactctgtcgcccaggctggagtgcagtggcgcgatctcggctcactgcaagctccgcttcccgggttcatgccattctcctgcctcagcctcccgagtagctgggattacaggcacctgccaccacgcccggctaattttttttgtattttttgtagagacggggtttcaccgtattagtcaggatgttctcgatctcttgaccttgtgatccgcccgcctcggcctcccaaagtgctgggattacaggcgtaatccggccactgtgcccggccctacaccctcctgtcttttccaggtttcgggttttagaacggcctggggatgactcaaaatccccacgactgccctgtctcctggagggtctagtggctatcagtgcctaggggagtggagcctcctgagggagcagctgaatgaataatagtggaggagatgcctggtatgctcttcatctacataaccaatacttggggtgctcagcttctctctcccaactccagtttccattcattggagacacatgaccgtcagccaattggatgttgctattgaggaaaaggagaaatgattcctatcttctggattgtctcatctctgaagagagaactcagagaactcccaaaagacaaggaaaggccacttcaacggggtggagcaatagcctgcaaagcaaaatatacatgggggtacacaggggacacaatgccgtgttggtgggaaatagtcaattagcacttctcctttcctctatgtgaaatgttcagagaatcaccaccagacactttcctgtcaaaatatgcatgcttctcctccattcatctgttctggaaacagattttatcagattgtcttttggttgaggctcccctttggaaacttcaaagggtgttatgtcttcagcgcactctcctatgttttcttggtcctgggtggcagaattggggtgacctaatatgcccacagttgccatgtctcttggagggtctagtgagtatcagccggagtcactcctcccaggggacagactgaggtaggagaatggggactcccaagagagcagctgaatgccttgtgatggaaggagactcctagtatactctgcatctagatagccaacccctcgagatgctcagcatttctttccaaaccccagtttcctgaacttggagacctatggctggtcagccagttggatggtgctattgagagaaaagagaaatgcttcctgtcctctggattgtgtcaactgtgaagggagacaaaaccccaaaaaacaaagaccaccccagcagggtggaccagtagcctgcaaatcagaatatgaaagggggcacacaggggggtatagtgcagtgttggtggaaagtagtcattgagcgcttcggtgagcaggatgggggtggagagatgtctcatgtgatagggtgactgtgctgacacatgagtcagacatcactgtgttccagccagcacggcccctctgtgggcttgtcccttgtaaagaattgttcatagattgcagcttgagtgtttcaaattaactttacattgcatttgtcactagaaccaaatccaagaatgattgcgtaggtcagtgagacacagaagaggcaactcaacaaagcccatgacatacagtgcatggctcacaatcccaggagatgagggcagcacagctgcagagcaacacagagtggggggaacatccaggatgcacattcaaccagtaggtggggagcaagacagacagggacctgtgggccaaagcgtttcttggggtctagggaattgaccaaggaggtgtctcttggggagttgtttctggtggatttagagcaagcaggcactagttctgtgaagtcgcactgtgattaagaggtggtctgtaccatccatgtggggtgtaagggtcagtggtacaagtcaaattggttatatctagctgtcccacagggaggtggtcaccagaatgcagttgtgtaataaatatatgtgagttgaccacatggaggaactgggagaaagtggagaactagaaactctgttgagtttgaataaagttttcttccgttatgagaaagttaaatccttaaagaaaatgcatgctaaggtaacatataattataagaactcagtataagaggcaactctagaattaattaaattattgtatatggagatgacaggtagtggattgattattctcctgtagataaccatttgtccctgctttttctgttaagtgttcaccacttgtatcattggctggcaatacctggtttgtcatagtttcacattaccttaaacagatgcccagactgggcacagtggctcatgcctttaatcctagcactttgggaggctgaggcgggtggaacacctgagatcaggagttcaagatcagcctgaccaatatggtgaaaccctgtctctactaaaaatacaaaattagccaagcgtggtggtacatggctgtaatcccagctactcaggaggctgaaacaggagaatcacgagaacctgggaggtggaggttgtagtgagccaagatcacaccattgctctccagcctgggcaacaagagtgaaactccgttaaaaaaaaaaaaaaaagatgccctggtttcacaatttgctttttccattggtctatctttgtctctctgataataccattttctcttaattagtatagcattcaaagctgcagtgtttagtgggtatattgcctgtctatcttagtcatcttgggctgctatatcaaattaccatagactgggtgacttaaagaataaacatttctttctggcagttcttgaggttgtgaagtccatgttcagggagctggcagatctagtgtctggtaagggcccacttcctggttttgcagatggtcatcttcttgtgtttcttcatgtgacagaggagaggaagccggctctcctgtgtcttctcataagagcactaatctcattcagaaaggatcgactcttatgctgtcatctaatcctaattacttttcagagatgtcaacttctaatactatattgggggtaggttattaatatgtgatttttttggagtgatgcaaatattcatgccgtaacacccccccaaccatactctatagagcatcttggctattcttagtcattgtgttatatttcagtttttagaagtagtttttccttaattttagtgaaaaaaacaaactgccttgtaaatttcatggactaaaatataactgtagtcatatttcagaaacgttacatcatagtgctatttaatctccttttaaggacacatgacattttttcatttatttcattttatattgatgtttttcagtgtagactttttgcataataatcattttatatccttcctgagacttttttggacttgaagaaaattagttttaatagaaattagtggctgggcgtggtggctcatgcctgtaatcccaatatttgggaggccgaggtgggtggatcacctgaggtcaggagtttgagaccagcctgacaaacatggagaaaccctgtctctactaaaaatacaaaattagccaggcctggtggcacatgcctgtaatcccagctattcgggaggctgaagcaggagaatcacttgaacctgggagtccaaggttgcggtaagccaagatcacaccactgcactccagcctgggcaacaagagtgaaactccatctcaaaaaaataaaaaaaaaatgaagagattattccagtgtcggcaacatggcaaactttgcctatacaaaaaattacctcgtcattgtgatgtgtgcctgtcgtcccagctactcaggaggctgaggtagaaggatctgttgagcctaagagttcgaggctgcagtgagctatgattgcaacactacactccagcctgggcaacagaatgataccctgtttcaaaaaaaaaaaaaaaaaaagaaaagaaaagaaaaaagaaaaaaattagtttcaataggatatgctgtcttttaaaaattacattcagcaacttgttgctgataattaaaattcgctgagatttatttctgtatagagtgtgcattctagaaacttactaaaaatattatgtatgcacaaaatacataaaagaattgcacaatgaattcaaataatgatggaaccagtattgggaataagataactgccttacttttccttatactttctcaacctgggtatgcatcctcatcagtgtgttttatttttgcatgttttttatgcaaatgataaccgatatgtgatattttatatcggattttattttaactcagttatgaaccttatatggaatgatagttaattcactttcttatttaatggattttattatttagaacagtggttgtttccccaaaacattgggcagataatccacagagttccagcatttttattccaggctcatagttccccccaccaccctttttttttttttttttttgagatagaatcttgctctgttgcccaggctggagtgcagtggcatgatctcggctcactgcaacctccgcctcctgggttctagcaatccttctgcctcagcctcccgagtagctgggaatacaggcgcacaccaccacacccaactaatttctgtattttttagtagagagagggtttcaccatattgaccaggctggtctcaaactcctgaccttgtgattcgcccacctcagcctcccaaagtgctgggattacaggcgtgagccaccgtacccagcatagttccccctattctaaacatcttgactggccaggtgctgagccttatacctgtaatcctaccacttaggtaggccaaagcagcaggacagcttggactcgggagttggaggccagcctaggcaacatagcaagaccctgtttccaaaaataaaaaaaataaaaaataataaaaaataaaaaataaaaactgtttgaaaccaaagaaaccatattgactttgtgtagtgtatcctgcaactgatgcaagaatatattacatgtgaacatgatggaaattgaagaagccaatgttattattacctaaagtccatcttttacattaggcttcactctttgtgttctgtggtttaagacaactatgtgtcatgtatccaccatcacagtcttatagagaagtgttttactgccctcaaaatcccctgtgctccttctaatcatacctctcccctccctcttttgccacccctatttatccctggcaacaaatgatgatgttcctgcctctagagttttgcattttccagaatatcacatatttggaatgatactgtaagtggccatttcagacttgcttctttcatgtaaaaatatgctttgaaggtctctaaatacctttgttgcttgacaactcatttattttttatttttctttctttatctaaagatttttgttttgtgagagacagggtctcaaactccccagctcaggtgatcctcccgcctcagcttcccaaagtgcctgaattccacttgtgagccaccatgtccggccactgattttcttttttttttcttttcttttcttttctttttttttttttttgagacagagtttcactcttcttgcccaggctggagttcattggtgcaatcttggctcactgcaccctccacctcccaggttcaagcaattctcctgcctctgcctcccgagtagctgggattacaggcatgcaccatcacgcccggctgattttgtatttttagtagagacggggtttctccatgttgaggctggtctcgaactcctgacctcaggtgatccacccgctcggcctcccaaagtgctgggattacaggcgtgagccaccgcacgcggccagggccactcattttctttcatcactgaataacattctattgtacggatgttaccatagtttgtttctttattcacctgttgaaaggctcatcttgagcctggtgtcacgcctcatccctgagttcccagcacatgggagactgagatgagattgcttaaggccagaagttagagaacagcctggtagataccgtgtgagaccttatctattttttttttttaagactcaccttgtttgattctagtttttggcagttatgagtaaggctgctaaaaacgtttgtgggaggactttcgtgtggacatcagtttttagttcatttgagtcaatatgtaggaatgagactactgaatcagtaagaccatgcctattttcttcagagctccgcagactgtcttccaaattggctgtagaattttccattcacatccctagtgaaggagagttcactgtctccagcatttggaagtgtcagtgttttggattttagctactccaccaggtatttgctggtgcttcattgttgttttccttttttaattttttttccttttttttttttttttggagacagagtttcaaatcttgttgcccggaccggagtacaatggtgcgatctcagctcactgcagcctctgcctcccgggtttaagcgattctcctgactcagactcccgaatagctgggattacaggtgtatgctgccacacatggccactgtttgtattattagtagagacagagtttcactgtgttggccaggctggtctcaaacttttgacctcaggtgatcaacctgcctcagcttcccaaagagctggattacaggcatgagccactgcgcccgggctgttttcatttgctctttaataacatgtaatgtagagcatcctgtcatatgtttgtttgccataattacattctttagcgggaggtatacttggaaagattgggcttttttttttttttgagactgagtctggctctgtcacccaggctggagggcagtggcgtaatcttggctcactgcaacctctgtctcccgggttccagtgattctcctgcctcagcctcctgagtaactgggattacaggctcatgccaccaggcccggctaatttttgtatttttactagagacggggtttcaccatgttagtcaggctggtctcaaactcctgacctcggtgatccacccgtctctgcctcccaaagtgctgggattaaggcatgagccaccgcacccagcgttttgcttattttttgattggttggtttttttcttatagaattttaggagttcttcataccttttgggtaccagttcttgatcagatagctgttctgcaaatattttgtcccagtctgccgcctgtctttttattctgttaacagtcttttccaaaacatttttgttttgaatgaagtccaatttattgattttctcattcacagatcatgctttttgtgttgtgtgtgaaatcttattgccaaatcaaggtcgtcttggttttgacaagtgtgaaattgtgagttttgcattttccatataagtaaacgattcattaggaagtagttttgtaaaaggtgcagttctgtgtctaattcatttctttgcatttgctaattcaggtgtttcaataccatttgttttgtgccaccatgtctaattttttattttattatggagacgggtatctccttatgttgcccaggctggtctcgaactgcggggctcaaatgatctgtccgccttggcctccagcttgcatttttaatacacgtctttatagtagatttttctgtgttcctagtgcctctcttgtcatcttatggaatcttctcttatatatttagtttattgagtgtttctaatcatcaggagatattaacttatttatgctggaggttgcacttttttgaattgccgacgtgtgaaaaatcagactttggccatgaccttgagcagtaggatataaataactcccacatgcttagcgttccaaaaatggaacactaggcataaattggttaaggcttgtcagatgccttttctgcctctattaaggacattcttgtggtgttttgtttgtttgtttaaagatagagtctcactctgttgccccggctggagtgcagtagcgcaatctcggctcactgcaacctctgcctcccagattcaaatgattctccacgtcccagtcaagtgactgggactacatgtgccaccacgcctggctaatttttgtattttttagagatggagttccaccacgttggccaggctggtctcaaactgctgacctcaagtgatcttcccacctcaacctcccaaagtgctgggattataggcatgagccaccatgcctggctgctaccatgatttattatcattacttatcttaaaacaaaatgtaaaacttatcagcttaagaaattttacatgtacagttgagatagtttgacaaatctacataagttctctaagatgaattctattgtattttgcttttttcaattatcccgaggtgtcatgcatgttgtagtttagtccaagatgttattttttctttttctttttttttttttttgaatcaagtttcactcttgttgcccaggctggagtgcaatggtgcaatcttggctcaccacaacctccacctcccagcttcaagcaattctcctgcctcagcctcctgagtagctgggtttacaggaaagcgccattacacccggataattttgtatttttagtagaaatggggtttctccatgctggtcaggctgatcttgaactccaaccctcaggtgatctgcctaccttggccttccaaagtgctgggattacaggcatgagccaccacgcctggctaagatgtcattttctaagagtaaataatatcccattttatgtatatgcttaccacattttgtttttacattcagccatcaatggatatgtgggtggctgcattgctcattactgccacctcaggaaggtcgtatagtggttaaatctgtgcttatgatacctgggtatctcttaggagtttcttgtttgccctcttgtgtacatacggtgccaggttttgcttaggaatgtcccctttgccctatcagcatctatctagctacattctgacaggataactgcaaagtgaatgattcctgggcatcataatggaagtttctttctacctaggtgattcccctcctctctgcttatatctagcatgcctgatttgggtggtccctgggggtgtgggatttcccaggggctccccctcctgctctttgctacctacatgcttcctctgacaatatcatcaaagattacactttgagaacaggcattttcaaggatacacagcctcaggactgctaatgttaactttgttttgcctatgaattcgtaggactctatcatgacaggtgctacagacccacagtccaaagagacattagggacagcccaggcaacccgcttttctccctgggttcggtaaatacatttcctatcctgctgtggctttagcccttgttcagttctagcatcacaattgctttatgaactagccaggtgtggtggcacatgcctgtggtctcaactactcaggaggctgaggcatgagaattgcatgaacccaggagtaagaggttgtagtgagccaagatggtgccactacactccagcctgggtaacagaatgagacgctgtcttaaaaaaaaaaacaactgctagctgggcatggtggctcatgcctgtaatcccagaactttgggagcctgaggcaggcagatcacctgaggtcggcagcctgaccaacgtggagagactctgtctctactaaaaatacaacattagccaggcatggtggcatatgcctgtaatcttagctactcaggaggctgaggaagaagaagtgctagaaccccggcagtgagccgagatcatgccattgcactgcagcctgggcaacaagagtgaaaaaaaaaacaagttgctttgtggaagaaagtaagtatacacagggagaaagagatctgatgaccaaagcagggaatacgtgtttggagtccacggcatcctgagaacttcttgggaatagagtctaggcccccagtgctgtcactctcacccatcttcttctacacatgtgagatgtttcaggacccagtggcttttaaggatgtggctgtgaacttcacccaggaggagtgggctttgctggatatttcccagaggaaactctacagggaagtgatgctggaaactttcaggaacctgacctctttaggtaaggatgacaatattccttccctcagtccattagtgaaccagtgtttctagctcattaatgctgttgagtgatttagaacatagacaggaaatactttgatgaataaatgaggtatggctgcagtaaatcatgggcgtagaatctaataattttttcacaattttatactgcctcaggactattttttctgtgtctgtattttaggaaaaaggtggaaagaccagaacattgaatatgagcaccaaaaccccaggagaaacttcaggtaatttgtacttacaagacaaagcagtgtctctctagacaatcttagaatatgacaatatattaaaaataagtaaaacaaagaactaagtccaggatcaaattcatttatttttagaatatttgatcaaaaaacatatatgtaaatgtgacctaggctgtgggctcactcctgtaatcccaatcctttgagaagtggagataggaggatagcttgaggccagcagttcaagaacagcctgggcaacataacgagaccacatatcaacaacagcaaaaaattagctgggcattgtggtctgtagtcccagctactcaggaggctgagtgaggcaggaggatcacttgagccagtaaaggctgcagtaagctatggtgatatcaccacactccagtgtgggcaacaggataagaccctgaaacaaaagaaaaatgacacagagtatttagtattttaaaatagtttacatgggaagagtattaagataccccatataaacagttttttaaataataggtatggctgggtcaccttgtagaatatgttgtccagtcaccttcaaacaattcagacagggcagaaagcctacactttgatggagagtgttaaaaatgcaagtgcaatacttgttgattaatatagaagtacttataaacaaacccttcataatatgcttctcatttttgacaggagtctcatagaagaaaaagtcaatgaaattaaagatgacagtcattgtggagaaacttttaccccagttccagatgacagactgaacttccaggagaagaaagcttctcctgaagtaaaatcatgtgaaagctttgtgtgtggagaagttggcctaggtaactcatcttttaatatgaacatcagaggtgacattggacacaaggcatatgagtatcaggaatatggaccaaagccatgtaagtgtcaacaacctaaaaaagccttcagataccgcccctcctttagaacacaagaaagggatcacactggagagaaacccaatgcttgtaaagtatgtggaaaaacctttatttcccattcaagtgttcgaagacacatggtaatgcacagtggggatggaccttataaatgtaagttttgtgggaaagcattccattgtctcagattatatcttatccatgaaagaattcacactggagagaaaccatgtgaatgtaaacagtgtggtaaatcctttagttattctgctacccatcgaatacataaaagaactcacactggagaaaagccttatgaatatcaggagtgtgggaaagcatttcatagtcccagatcctatcgtagacatgaaaggattcacatgggagaaaaggcttatcaatgtaaggaatgtggaaaagcattcacgtgtccccgttatgttcgtatacatgaaaggacccactctaggaaaaatctctatgaatgtaagcagtgtgggaaagcattatcctctcttacaagttttcaaacacacgtaagattgcactctggagaaagaccttatgaatgtaagatatgtggaaaagacttttgttctgtgaattcatttcaaagacatgaaaaaattcacagtggagagaaaccctataaatgtaagcagtgtggtaaagccttccctcattccagttcccttcgatatcatgaaaggactcacactggagagaaaccctatgagtgtaagcaatgtgggaaagccttcagatctgcctcacaccttcgagtgcatggtaggactcacactggagagaaaccgtatgaatgtaaggaatgtgggaaagccttcagatatgtgaataaccttcaaagtcatgaaaggacacaaacacacataagaatacactctggagaaagacgttataaatgtaagatatgtgggaaaggcttttattgtcccaaatcatttcaaagacatgaaaaaactcacactggagagaaactctatgaatgcaagcaacgttcagtagttccttcagtagttccagttccttttgatatcatgaaaggactcacactggagagaagccctataaatgcgagcaatgtgggaaagccttcagagctgtgtcaatcctttgaatgcatggtaggactcaccctgaagagaaaccctatgagtgtgagcaatgacggaaagccttcagatctgccccacacctttgaatacgtggtaggacacacaatggagagaagccctatgcatgtaaggaatgtgggaaacccttcggatctgcccagaaccttcgaattcatgaaaggacacaaacacacataatgcactctgtagagagaccttataaatgtaagatatgtgggaggggcttttattctgccaagtcatttcaaatacatgaaaaatcttacactggagagaaaccctatgagtgtaagcaatgtgggaaagcctttgtttccttcacttcctttcgatatcatgaaaggactcacactggagagaacccctatgagtgtaagcaatttgggaaagccttcagatctgtcaaaaatcttcgatttcataaaaggacacacactggagagaaaccctgtgaatgtaagaaatgtagaaaagcattccataatttctcttctttgcaaatacatgaaaggatgcacagaggagagaagctctgtgaatgtaagcattgtgggaaagcattcatatctgccaagatcctttgaatacatgcaagaacacacaatggagagaaaccctatgaatgtaaagaatgcagaaaagcattcagcttgcctacttcctttcatagacatgaaaagactcacactggaaggaaacactatgaatgcaagcaatgtggcaaagctttcacttcttccagttcttttcaatatcatgaaagaacacactagggagaaaccctatcaatgtaagcaatgtgcaaaagcctttatttcttccacttcttttcaatatcatgaaaggactcacatgggagagaaaccctatgagtgtatgccaagtgggaaagccttcatttcttctagttcccttcaatatcatgaaaggactcacactggagagaagccctatgaatataagcaatgtgggaaagccttcagatcagcctcgcaccttcaaatgcatggaaggactcacactggagaaaaaccctatgaatgtaagcagtatgggaaagcgttcagacctgacaagattctttgaatacagataatgaatgtaaacaattaactgtttataataactgtatactaacaaatgatattctttttaaataagaagctataatatcccattggtgtcatgtattagatcagccttatactgttaaattgttattatttggacattgtgagtcagtataaccatgtggataaaatgccagacatctttttattcgaaaattttacttttcatgcttctgtacttacatttttatctcaaccttaatttttctttctttttttttttcccccagaaagaatctcactctgtcacccaggctggagtgcagtggcatgatctcaggtcactgcaacctctgcctccagggttcaagcaattctcctgcctcagtctcctgagtagctgggactacaggcatgcgccaccatgccaggctaattttttgtattttttagtagagacggggtttcaccatattggctaggctggtctcaaactccagacctcatgatttacccacctcggcctcccaaaatgctgggattacagacatgaaccatcatgcccagctgcaaccctaatttttcattcagtcataataccaatagttatctcatgcacctctgagtgccttcttccccaaaaccagcagtgccatacctgctgtcagcaagggtgtaatataccatagtgataaatatgaccaaaagccataaatgactgtgagatgtatgagaattacaagtcacattagtaagaagagaaaaattttggtcatgtttatgatttgaaatacgttttcctctatcacatttaaaaatatagttacaaaatgcccttgtttttgtcctgattcatcatggtcactgaggagcatcgtctcatatgcctggtatgtgacacgtgtctctccaacaataaaagacttggccttggctgggcatggtggctcacgcctgtaatcccagcactttgggaggccgaggtcaggagttagagaccattctgaccaatatgatcaaaccccgtctctactaaaaatacaaaagttagcagggcgtggtggcatgctcctgtaatcctagctattcaggaggctgacataggagaattgcttgaatataggaagcagaggttgcagtgagccgaggttgcaccattgtactccagcctgggcaacaagagtgaaactctgtcttaaaaaacacaaaaaaagacttggccttagggccgagtgcggtggctcacgcctataatcccagcactttgggaggccgaggcgggcggatcactaggtcaggaaatggagaccatcctggccaacacagtgaaacccagtctctactaaaaaatacaaaaaattagtgaggcgtggtctcaggctcctgcagtcccagctacttgggaggctgaggcaggagaatggtgtgaacctgtgaggtggagcttgcagtgagccaagatcgcgccattgcactccaacctggacgacagagcaagactccatctcaaaaaaaaaaaaaaaaaaaaaaagacttggccttgtggtgaggggagggcatctgtaaactcctggacctgtttttgccttacttattctctaaagactaaaatatttcctaaaatgtacaggcactgtttaccagaaagtaccttagttaaaacatataaatttgtttatgccttataaagctatattttttcaaattgctttactgagtcataggaggctaataaatttgtgtaaattgtctaaatacaagcctgtcttatatttctctgataatgtgctgctgataatgtgctgctgaggctaactttctctgataatgtgctgctgaggttaacttgtcaacagcctgcttatctcagcagtgtaaagttaacagcaacatggaaaagtttcttttatatattatgcaatggcatagagcaattcagtcacttcctttaaggttccaatgaagctgctctttaggaacgcttatttcaaactccctaaggtcaaaatccaggcaccacaagatgcagcatcagccactgaccaaaccctgtctgtgtgtggagatgacacacccagtcccagataatgtatccacaccagtgaagggtggagtcgttgattgtcagatcacacaaagtgactcagagcagggaagacagggcagtgaaacctgatcaggcacagtggctcacacctgtaatcccaccactttgctagtccaaagcgggtggatcacttgaggtcaggagttcaagacaagcctggtcaacatggtgaaaccctgtctctactaaaaatacaaaaactagctgggcatcgtggtgtgtgcctgtaatcccagctaatcaggatgctgaggcaggagaatggcttgagcctggagacagaggttacagtgaactgagatcacaccattgcactctccagcctagtcgacacagcgagactctgtctccagaagaaaaaaagaaagagttggatgcacctgaatccaacccctgcctcatccttctcccttgaaggccaaatacaccctgatacttttcaccaaagagtagaaacaacaccattcacttgaccccaaatgtgactttccacaggatgcaaacacagtgttggaatggccaatgacaatgacaatgaaaatgcaggctgagggtgatgaacaggacacactggagagcctgacatcggcctagactatgggggtgtcttgatgcttcacaaagagcccaaggagcaccccaaagaggacactggagcacaggcccaaagggtgttcacatgccaggaaggccactaattttgaaagtcagggacattggtgcctgcttgagtcctgatgctttatctataacatatgcttttctgcatctggttagacaaggaaatctgaaatttttgtttcagcatttagaaataagttatttaagcaatcctcacactcatggtttattctggaactaccttcagacacacagctacagatagggtatataatgagtatttccaaggctacactctgtaggaaaaaacttcatgaagtcagtgggaccctctcatgggagggttttaagacccacaatcaaaaaggtggggaaacattagagtggaaggagggcagcagaaggtcaaggactttcccggaggcctaacatacccaacattattaccctagatgaaaaccaaatacatatcctaacaccacatactctcttcaatgtttaacagacaaaatgaaatgtattcaaagctaagcttccagaattccactttacgctattaatgatgttttaatatccctcaatgtgttgatattaggacatttttaaatatgaataccattttctggttatatatggaaaatatcttgatttctgagatacaaaaatgctcatttttagatatacatggtcttgcactttttttataaaataaggtgaaaagacaggaaaaattttttcagatcatggaacttggattaataggagaagagtcatacaaatttatttaacatgtatatatgggagccttcagaatgaagacccacccaacaataagacaaaaaagcttatattaccattctgaggccaagaaagaatgcagacttggctggccaaaaaatcccgggtttggtgggtaagtcaggtttaatggcaagacagattagggaagaggaaaggaagaagcttacctcctgtgtagctaaggagaccttgttatgtagatgaaggctccctcatagagaataggtgggaaatgctgcttttcagacttttatttagacttttaagtaatagggacaggattatgctatgttgcccaggctgttatctaattctttttctcaagcaatcctcccagctcagtctccgaaagtgctaggattacaagcatgagccgccatacccagacagggtttgttcccttgtaaagaattatttgttgctggacacagtggctcacagaggccaaggaaggaggatcacttgagcccaggagctcaagacctgccatggcaacatgacaaaacctcttctctacaaaaaatacaaaaaattagctggatatggtggcacgtacctgtactcccagctatccaggaggctgaggcagaaggataacctgagcctgggagattgatgctgcagtgaactgtgattgcagcactgcactccggcctgggccacagagtgagagcccttctaaaaaaaaaaaaaatatatatatatatatatatatatttgttcacttattgcagcttcagatttttaaaattaattgtaaattgcattttcactacagctggaaaaataagaaaattttgcacagagccaagataaaaatagatgtcagaaataaatcattagtcttatatagcatttgtttcaaaaaaaaaattttttttttttgagacaaagtctcgctctctcacccaggctggaatgcattggtgtgatctcggggcattgcaacctctgcctcctgggttcaagtgattctcctgcctcagcctcctgagtagctgggatcacaggcacgtgccaccacacctggctaatttttgtatttttagtagagatggggtttcacgatattggccaagctggtctcgaactcctggccttgttatccacaagccttggcctcccaaagtgctgggattacaggcgtgagccaccgcacccagtctcaaaattcttaatttttttcttcttcagatgtggtgtagtacatttcttaagtctgtccttttttgtggatgatttctttatttctttttctttctttctttcctttttttttttttaagatagggtctggctttgttgcccagactgggatgaggtagcacaatctcagctcactgcaatctccatcttccaggcacaagctatcctcccacctcagcctccgtagtagctgagaccacaggcacacaccactacacccaaagtgctggtattacaagtttgagccacagtgcatggccatttttggatgatttgtaacagagtttcagggcatagcgttgagaatgctgattgggaaaagaaatagagaaaatcttttattacagcttgagaaaatgaataatcttccacaataaagtatagtagataaattggtgaattacaaagattcagcaaaataccagtcctcctttgcaggttggggaacttgtaatggtggataactcttcttcttcctgttatctgtggggtaagacctggctggcaactgttgtcatatgtttgtgttcacatatgattaatgtgtagtatgtgctttgttatcatggaaataataatgaaataatattgtgcaccttaataagataataagattcagagaatatgattaaatgctgagtttatctgagcacatagtttgaggatagccactggggaaacagatatcctgaagagtggggtcagtgctccaacacggggaatttgagtcttctcttctatagggcaaaatgaagcttaacagggtgacattttccatacaaggccggtgcacacatttcagtgatttgataggttgcagctaccaaatttcaaggatgattgctttaacttttttttttggatggagtcttgttcggtcgcccaggctggagtgcaatggcgcaatctcagctcactgcaacctccacctcccgggttcaagcaattctcctgcctcagactcctgagtagctgggattacaggcacgtgccaccatgcccggctaattttagtatttttagtaaagacggagttcaccatgttggtcaggctggtctcaaactcctgacctcatgatccgcctgcctcggcctcccaaagtgctgggattacaggtgtgagccactgcagccggcctgctttaactttttgtaaggaggggtagtggtctcaaaaggatcctacctctggcacttctctgtcttttctaatcatttacagcctaagaacaaggaagagaatctttttgacatgcacagggaaggagcaattacatagtagtgtaaacacatttctcaatatgtttattgactgaaagggttagatacttttattttccctgatgaggatgaaaggtaagtgccttataaattcctgcctgcctgtaaacataaactgagtttgagagattttgctggattcttcaaacagtgggtattttctcattgaaacagaggcctgagtccagggactgcaagctaaggccaatgacaagcctacaaagagaggtcattgaaagctcacaccaggcgcattggctcacacttataatcccagcactttgggaggccaaggtgggcaaatcatgtgaggtcgggagttcgagaccaatctggtcaacatgacgaaatcccatctctactaaaaatacaaaaattagccgggtgtattggctcacgcctgtaatcccatcccttaggaggctgaggcatgagaatcgcttgaactcgggaggcggaggttacagtgagctgagatcatgtcattgcattctagcctgggcgacagagctagactctgtctcaaaggaaaaaaaaaaaaaaaagaaagctcacttggttcttcccctgcaggtgccccagctactcacattgaccatgggaggagccctttatactgagagaatctgagatccttggaaagctagggatccacaggcagatacggtagtcagtgatgccctccacaagtgataatttttgtcatggggcttttcctagacatttgtagtgaaacaaatgtgagtttaggtaagaaataacttttaattctagaccttgaagccagcttgtcctgcgggttgagcacggtggctcacgcctgtaatcccagcactttgggaggcccaggcaggttgatgatgaggtcaagagattgaaaccatcctggccaacatggtgaagccctgtctgtactaaaaatacaaaatttagctgggtgtagtggcacatgcgtgtagtcccagctactcaggaggctaaggcaggagaatcgcttgaccatgggaggcggaggttgcagtcagccgagatcatgccactgcacttcagcctggtgacagagcaagactctgtatcaaagaaaaaaaataaagacgtcagcttgccattaggagaggtcataaaaggagtctaggtactgaacttgtaagtaaaaaaaaattttaaataaggccaggcccagtggctcacacctgtaatcccagcacttcaggaggctgaggcaggcaggtcaccccaggtcaggagttcaagaccatcctggccaacatggagaaaccctgtctctactgaaaatagaaaaattcgctgggtgtggtggcgggcgcctgtagtcccagctactcggaaggctgaggcacaagaatcgcttgaacccgggaggtggaggttgcaatgagccaagatcacgccattgtaatccagcctgggtggaagagctagacttcgtccccccgaaaaataaataaataaataaataaataaatggggttgtatataggcttagaatgggtcagtcagaaattcaggggccactggtcgtggtggctcatgcccataatctcagcacttggggaggctgaggtgggcagatcacttgaggtcagaagacaagtgtggccagcatgatgaaaacccatctctacgaaaagtataaaaattaactgggcatgatggcacacacctgtaaacccagctactctggcgactgaggcatgagaatcacttgaacaccagggaggcggaggttgcagtgagccaagatcatgctactgcactccagcctgggctacagaacaagactgtctcaaaaaaagaaaaaagttcagggacctggaggtaggagagaaactgaagcatgctttggttaatagatatttcgttctgactgatcactaaagacaaagctattcacctaatggtttgtgaggtaaatactggaatgtctaatctgtatctggtttgtcataggtaacaaacgtggcacaatctaagtcataatgcgaagggtgtttcattgcagtaaggtgctcttgcacaacacaaagggtgggggattctttttttttttcttctttttttttgagacagagtctcgctctgttgcccagggtggagtagagtggcgcagtctcggctcactgcaacctctgcctcccaggttcaaacgattctccttgctcagcctcctgagtagctgggactacaggcacatgccacctcaccctgctcatttttgtgtgtgtttttagtagtgacggagtttcaccgtgttgatcaggctggtctcaaagtcctgacctcaagtgatccacctgcctcagcctcccgaagttctaggattacaggcattagccattgcacctggccacatttaagaattttattttatgatttgggtgttaggattttaattagctggttggaaacttagtgaatagtttgataatgtttgaagaaggaaaatgagttcttgaaataagctgttttatgccaagtcaaaataataaaaatatgaatactcagacacataccaccccaaaaaataaataggccttgggcatttctggtgtgtctcacttatttttgatacgcaaaggtgaccaaagttttgattcttttcgttattctttgtagctttgtcatctctttgtcacaaagcagaattttgccacttttgaatttttagtaacagaatattaccattaatacaccattagtattatgctgagagggtgtctttctggttttcttgcctgagcctgttgcaaacatgctgctccgtgaagttgtgggtcacgtaattgacttgcccattccactacttaatggcacttgagttggttcaagtttatcttttgatcttattgacaatgctcttcttgtttttattcctaattggaaatacaacagaaatttttacacattgggaaacaattgctgggttgtagattatggataaattcaaatttactaggaaatgtggatagagtatgaatgtaacttatgagttaaccatctcacctttcatgcatgtgtctttattcttgtgatttgccaacactttgaattatctaactcactttttgttgcccgtctactcttagacagaatttctgtgtttctttttgctttttacttgctgccgttggttgagcatttttcttatatgatctttcatcttctgtgtagcagattccagtcatcctcttacatttgactaatttgtagggtttttttttccttttttctttttttttaatttgagacagtcttgctctgtagcccagatggagtgcagtggtcactcactgctcactgtagcatcaggctcgtgggcttgagcaatcctcccacctcagctttctgcccagttaattttaaaaaatttttttgtggagacagggatctcactgttttgcccaggctgctctcgaactcctgggctcaatcaattctcctgcctcggcctcccaaagtgctgggattgcaaataggagccaccacactcagcaatgagggtttttttttttgttttaaacaagatatccgtacatgtttctgaccaatattttatttaaaatctttaagaactacatattaacaaaggttattctgtttttcattttctgttttccattttcattatgactacttgtttttctttcttattctcatttttttcctagatcattacaataattttccatgtagtggccctggcatgcattttgatccttcatgcaatcatacagctacctcgatgtccattctctctgccattctgaaattggacctcactcctttttgactctagctctccatctgctatgtgataaagtcctgtcttgtgatggttactatgggactgaatgaagaagggcagatgcagaaataaagacaaaagatctatgttaaagaagggatcagggggctccttgcttctagtgagcaagggccctgagcttctatagccctttgtttttattgggtagaaagagcagggaggaggaggtaatggttggtcagctgcttgatttatcacaggttcacatgattactttctttgtacaacaggcttcagatgtgcctgtagataatcacaagaaacactgcgcttggggagtaactgccctcagcattctttctgggtggcagacgtagtttgtcagtttgccaacaagctgcattcatgagaagagtttgctgtttgctcattagcctccagtggtatactgagttgatcaggacccccattctttcagcctccaacactgtctgattacattgtttccaaagcctcttttatggacttctgtttaccccttggcgtgtcctgcatttactctcctcaaaatgtgtacttagaggccgggtgcggtggttcatgcctgtaatcccagtactttgggaggccaaggcaggaggatcccttgagcccaggagtttaaaaccagcctgggccacactgggagaccctgtctctaaaataaaatgtatacttacaagccctaaaccccaacagggtcatatttggacacagaccttttaggagatcacatacatttataaaggagagccctcataatgggattagtaagaagagagagaattctctgtttctccagcatgggaggacaaagcaagaaggcatctagctgtaagccaggaagatagccttcactgggaacaaaattgctggcagcaagattttggacttcccgcactccagaattgtgagaaacaaatgtttgccgtttaagaaactgagtccatggtatgagtccatggtattttgttataccagcctgagctaagtcaccccaagagtcctcacattaaccatatactgtcgtacaagtgctgcatttggatctacctggaatgtctccaagtcttctacttttcctcttggacccattgtgagaataggttttgcttcataggcaactgctggtgatagtagtgatagcccataacaactagggagttaaagaaacttcctttctctctctctctctctctgtttttgaaatggagtttttgctcttgttgcccaggctggagtgcaatggcacgatatcgggtcactgcaacttctgcctcctgggttcaagtgattctcctgcgtcagcctcccgagtagcttggattacaggtgtgcaccaccacgcctggataattttcgttttgttagttacagacggggtttcaccatgttggccagcttggtctcgaactcttgacctcaggtgatccacctgccttggcctcccaaagcgctaagattacaggtgtgaaccactgtgctcggcctcttttatatgtgtgtgtatatatatatattctcttttttaataaaagtaaatagaaactaggtcttactatgttgcccagggtggtcatagcccaagattttgggctcaagcgatctacccgcctcgctcacccaaagtgctgagattaaggcgtgagaaactgtgccaggccaaatgaaagaaacttagtgggaggcctggcacagtggctcacacctgtaatcccagcactttgggaggctgaggcgggtggatcacttgagctcaggagttcaagaccagcctggacagcatgttgaaaccctgtctttactaaaaatacaaaaaattagccgagcatggtaatcccattctcacagtcatagaaaggttcttttttaaggattctacctacttgagagcatcatatactgccagcacttgttcacttcaagagtgtctggtttcatctctatgacataattacaaccaaaatcctaaaggaactgatttaccacactgtgtttgccataaggcccaatttgtacctgcagcagcagctgtatcatcccaactcacagctctaccctctaaaggtgtgcctgaggcttgtgatccagtccatagggaaatatcactacctgctgtgttttataattggaccatccaagggttgtcagggttttcccagagagttttgtgggatttttttttttttttgagaccaggtcttgctgaagttagtatggcagcatactaacacattaacctgtcgaaagcttcctgcagagctgtgtcccagtctcaaagtgcccctttctaataattctatatattggtatcaaactttgggctaagtgtcagataaatgctctccaataatccaaagaccaacaaatgtctggatttcttttttcttttttgttttttaagagacatagtgtggttctgtttcccaggctggagtgcagtggtgggatcatatagctcactgcagaaactcctgggatcaagggatcctcctgcctcagcctcccaagtagcagggaataaaggcacatgccaccatgcccaattgtttataaatttttttgtacagatggagtctcactgtattttccaggctgttcttgaacgcccaggctcaagtgattccccaacctcagcctcccaaagtgctgagattacagtcatgaaccaatgcacccagccctgaaaaggaaatatttcgaatggaaattcaaagggagaacatctaatgttcaagttgatgtctatagagcagttaacgggaactatcatttagggtctgtgggattctaggacactaggtatgaaacaaatatgaggaaggtcagagaacaagctgacttaatgattaatgctgaaggtgctgccagcttggtttaagttttcctcctcccttcctccctgatgaatttgataaagtttaaagggatggtttcaccaggggccttttacattgacagcaaggaggtcatccgcctggtaaatcctcagtagtccaagcctcttacatggctagaatgatccagtccataaggaaacgtcaccaccctctgtgttttacaattagaccatccaagggggtcagggtttccccagggaatttggtgggatttttttttttttgagaccgtgtcttgctgaagtacagtagcctgatcaaagctcacagcagcctcaaactttggggctcgagtaatcctcctgcctcaggctcctgagtagctgagactaagggtacacaccacctctccaggctaataaaaaaaaaattatggagatgggagtgtctcacttcactgctcagggtggtcttcaacttcgggcttcaagtgatcctcccactttggcctcctaaaatgttgggattgcaggtgtaagccatggcacccggcctcccaggctgttgttgaaaggtctttgcaatctctaagagttctgcagcagtttattccctgacagtgagagtctcatcctttcaccccattttgcagcagtagttgggtgttcacttttctttccataaggaagcgagcttgccagtgaccctcatccccctcctcatcgatgacttctttgtcatcagagccttcctcttcataaattcccacggaatccaagttttcacgtcccaaattatgatagccacaggccctcaccagctgccatagcaccccatttcatggaagccacctgactcttctttgagcatcctgtcccaggagcccccatctgtgctctcccgggctccaggccctagagccgcgctgctgcagagcccagttcccagggctgctccctccacgtatccacatccatctccagctttccaccctttctctgaccagacaggcctggaggtgctgcagtgtcagtgaccgtgggtccctccgctgccacctccaccgcgatctggaagtcttttaaatgtacttaagttatcttagaattttccttccccactttatacataaacataggaggagagcagggactctgctggtgtcttattcacacaatgggattgagggtgtttgtgtcatggaactgatcaatggggtgagaagtagctgaataacctgcaggggcagcagagcccgaggccagtgactccacgctgaggccagtctggagcctgcaaaggaagggaaaggagcttttcctgggggcttcctgggcagcccgccctcccctacaggtggcctccagctgctcagagcagctccagaaggagtgtggattccgagaagctgtagggccctggaaagcagaagaccttcgtgcagacgcatttgtggggttctgtcctttctggtgttgtacctctggagcctggggctgtcttctgggcagggtttggggtttgacatacatggggtcgctggagtcagagttatttgtatatataaagaaaatgtgtgaaaatcaggctagagacacaattgtttggtggcgtcacctggataaaaggtttatgaggttgacagtttatttaggtccgaagcttaaccccaggtgagagtttcctgcaggtgaaaatgaagatctggaaggacggagcattttcatactgtgaggaggggatgggggtgtgtgagcaagtcttggccatgcctcatccccaattccggcccgctcgaggaaatatgcctctcctcctggtgcagtcttgcctggcctggtctcggttcccctgctgctctgaggcaggagatggctcctgtggacactgagtctgaaattccctgcacactcctgtgaccccgtgcagaacgaaggagcggggacagtcctttgagtgaggaagacgctagtgttctcttctaacaatagcaagtttggctgaaatgcaactatccaataacccgagtgcaggaagcagctcgtgtaagcttagagaagctgttgctagaatctgtcagtctggctccgcagggcctgatacccagggcttccgctgtcacttagacgtggggggcggggccgaacattccatccaatcagaggcactggctcggggccctgcccactgtgcatccaggcacggaggatgttgcattcctgccgtcacctttgtcgctgcgagggcggcggttgggatctggcctttccagccccgagagggacctagtgcctctacccagatttctgtcgctctgtcacctgcgctatgccctgctttactcacaggagctgtagagaggaccccggtacatctgaaagccgggaaatggtgcgtgtgctggccgggagtggtgcgatgggggaggggctgcctggaactggcgggacccgggcctccctgtgggcgactccggggtctgggaccgagtcctcctagagctgctcggccctcggtccccgcggccgctggatgtgggtgggccggcagccgggactccgggcgtcctgtcccgtccctgcccgtcgactgcggccttggccccgaagcccttttgtgcagctccgcgcccgcagcccgacgccccagcttgtgcgggggccacgggagggtcatgcgcggatttcgactcgggtgtggatttcgtccgtaggaggagcagcggtctgtggggcccacagcctccactttctcctgttaaaaattatactgaggtacgttaacaaaaagttcatttgaggaaacagccattcacgaatgagaaacacccggtcctggcttgtggtttgtcaacggaaaaaaaacagactatgtaaaatacagaagtgtattcagagccgagtaggagagaccttggccgagggaaacacaaccccaagcagcctggagtaagtggtccggaggcggctcaggacagtttggttttattcatttcagagagacaggaattgcagggaaaatgatggatcaaggctggaaggtgtaaattccattggcagaaagggtgggacctgtggaaggggggttaggaggcacaggtggttgagggattctgtaggtggcagctggttgagagtgtgaagctttgtctaaagtttggaggaggtaggaaggaatgctgaaggaagggggtctgttatctgccacttcattccatcccagccaaaaaacagtcctgtttctctagattttatgaattctaagacgtaactttacctttgccttgcgtggccttaggtcttgtttgtaatttggtatcttgttgccacaaggagtctgtttttccagtcagagaatgtctgtttttacatgaatgtgcgtcagttgctgcatgtaaactcctaaagggagagggtataaggagacctgtctcacctcccatcctgtcatacagaggcactcaattttcagggtgttttgggggttcccttggccaagagccagtcacttcacttagctgggaaggtactttgtttgtttttgtttttgtttgagacggagtctccttctgtcgcccaggctggtgtgcaatggctcgatctcggctcactgcaacctctgccttctgggttcaagggattctcctgcctcagcctcctgagtagctgggattacaggcacgcaccaccacccccagctaattgttgtatttttagtagagatggggtttcaccatgttggccaggctgttctcaaactcctgacctcaagtgatccacccccctcggcctcccaaagtgctgggattacagatgtgagccacatcgccatgccagaagatatgtttttatttttgttttacatgtttaaggctaggcttttataaggtacatgaggagacaaaccagataaatgcttgattggttgcagagatgcagtcgccttatttggacttgtcaaccggaaataatcaaaaggttcagatttcagttggaagagtttattcaagcagaaagatagcaatgaccaaaacacagactccagaaaaatggactcagtactccaaaattggaagttatgttcttgcttatattactgaaaaaagaggtcctgatcagaccccaagagagttcttggatctcacacaggaaggaattcaagacgagtcacaaagtgcagtgcgaagagagtttattgaaagctactctgggccagcatgatggcttaggcctgtaatccaagcactttgggaggcccaggcgagaggatcacttgagctcaggagttcgagaccagcctgggcaacttagcgaaaccccgtctcttccaaaaataagaaaaattagccggatgtggtggcctgtgcctgtagtctcagttactcaggaggctgaggtgggacaatcacttgaacctgggaggcagaggttgcagcccagccgaggatgcgccactgcactccagcctgggtaacagagtgagaccccatctcaaaaaacaaaaacaaaacaaacaaacaaaaaagagttgaagaccaacctggccaacacagcgagaccctgtctctatttaaaaaaataaaaaagaagaagaagaagaaagaaagcttctctgttacagagtagggcatcctcatacagcaagaggaggaatgtactgtcttaagtttttcttatgtagggatcttgtctatgtaaagaataaactaagctgtgcctacctgcatgtgggctgacagcatcacaaaatttattactctgttgatttaaagaaaactatcctttacattttagtgcacaagtgcattaaagcataactataattaccttgaaagcacatattatgggtattggggtattgggacatcgggacattctgtcgttgtgggagtgtaaggatacttgcaggcatcttcaggctgttttcttcatgggaaacattttatgactatgggttgtgactggcaaggagtgtttcttgttagtctcaagatggagctggttggtctttctctggctcccctaggcacctgcttccctaacacttatatagggaaacggcaaataaatataataggattacattttccatagaaggctgatgtatgaggtacaataatttaatttttttttttttttgaggcaatgtcttgctctgtggcccaggctggagcagtggtgccatcacggcttactgcagccttgacttccccatcttgagcacctccgcctcccaagtagctgagactatagtcgcccactaccacacctgggtaatttttaattttttatggaggtggggtctcgatacattgcccaggcttgtctctagctcctggcctcaaacagtcctccttctttggcctccacaagtcttgggattgcaggcgttagccagtgcacctggctaacaacttaatttgttatcgtttgcttttttcccccagagcttgttttcttttctttctagctggtttttatttccttttcaatttaaaagagtgaattcaacattccaactgaagacaatgtgatagccatgaagtctttgtgtgagaaagttaagagggaagttagtctactacagagatcagtagtgaagaggggcccagtgggatggctcacacctgtaaccccagcactttgggaggctgaggcaggtggatggcttgatctcaggagttcaagcctgggcaacatagtgagaccccccatctcaattgtgaaaaatcatattaaataaattaaaaatagcaaagagggaaagggtctttcctgtttcccttcagtcatttacaacattttataaaacagtataggtaagaaggaaggcgaatctgtaatcaaggaaagaggtgttccagctggctatttgaaagctgtgtgtcatgtgactcaaccccatgatcacattgcttcaagacagtttagagatgcaccagcttaaatatttgaattacttggttgtttttgtttgtttgtttgtcttgagacggggtctcactctgtcgtctaggctggagtgcagtggtgcaatctcagctcactgcagcctccacctcctaggttcaagtaattctcctgccttagcctcccaagtagctgggattacaggtacatgccaccatactcggctaatttttgtatttttagtaaagacagggttttatcacattggccaggctggtctccaactcctgtcctcaagtggtccacccaccttggcctcccaaagtggcgggattacaggtgtgagccaccatggctggcctgacttacttcttccaacagcctatataggtagaaaatttctagttatgtaatcagaggttaattggtggactgtgcctgattaagcataaatttcatttttctataaattagtaattttatttatttattttttttgagacgaagtttcactcttgttgcccagggtggtgtgcagtggtgcaatctcggctcactgcaacccctgccttccagtttcaagcgattctcctgcctcagcctcctgagaagctgggattacaggcgcctgccaccacgcctggctaatttttgtatttttagtagagacttggtttcaccatgttggccaggctggtctcgaactcttgacctcgtgatccacctgccttggactctcaaaagtgctgggattacaggtgtgagccaccacgcctggcctaaattagtaattttcaagagttgtatttcaatttgatttcagggtcgttaggtaccacggaccctactggattgaacaaaggaggacgaatgcgggaataaagacaaaggcaaaagaatatgtttggaacaaggggtcagggggcttcttgcttgtagtgaacgtgggccccgagcttctagcacccttcatgtttactgagtaaaggggatagagagaagcgggtggttgtaggtcagctacttgatttagagcaggcctgcatgactgcatttttcaaacaataggctccagatgtcccagtagataacctcaagcagcacagcaccagggagtgattgtcctcagtataccttctggcagcagaagcagatgtgagtttgcccacattctgcattcatgataaacagttcactgtttatcatatagccttcagtggaaagctgagttggtcacaacctttgggccttgggctcccaacatctctccctttctgtttatgcattaattgaatgaatgtaaggccaggttgggcagctctcattttctgattggcggtccatctgattttacagactatgaacaaaaaacagagactaaacaacatcattccaataactatatatgagatgttaatatagtgctttagattggtccaaatattgaggctctctaggccttgcaggaattcactccagacttctaaggaaggctgaaactcttgagtttgcttatttaagtcaagaattttgttttgcagttcaccaatatcaaaggtcccgtggatgctcactttggttgtattctaagttgtttacacaaatatgagtggcattaagatgacagcacaattgctgttgcaattgtaagctttgtgcttgttcccctaaccatagaactatggatttcaacattgccacttcagtttgtaactcagtgttaattctattatgaagtagccacacttggttggctgtatgcatccagttctgcacgtactgaactgtttgaatagaactatgcaaagtgatggagtacatcacaacagaagtttttggtgtgaccaaggaaacaatagccaaaattatcatgcctaaggctctacgggcacgatgagtaagctgagttagaagaagtttcacaaagtgcaaagcaggggtggcagcccaaggcttggacagattaatgggaatccatagcccagggatgcaacccaaaatcatcaaagtagagatattatgtgtttgtggccaggcacagtggctcacgcctgtaatcccagcactttgggaggccaaggcaggtggattacaaggtcaggagttcgagaccagcctggccaacatggtgaaaccccgtctctactaaaaatacaaaaattagccaggcatggtggcgggcacctgtaatcccagctactcaggaggctgaggcaggagaattgcttgaacccaggaggcagaggttgcagtgagccgagatcgtgccaccgcactcaagcttggcaacagagcaaggctctgtctcaaaaaaaaaaaagagatattatgtatttgcaatgtgctatgattaatgtagtgatataactgacaagatttacaggtcaattgggtattgtttacctggagctaatccttcttagctgccaaaaagacataaggattaaaaacacaaaccgtaaactgagtggtgatattctttacaagtgtagcattaaaactgtgttgcttactattgctattattggatagtatcccaaccccgatgctgccattcataaatgaaggtgctgccttccataacgtcttttggattggtccttgcctgcctggataatgccactgaggaagaggtgagctaaagcctgctccacaccaagcaatctgggcagcagactgggattggatcccggtgtggtataaagaagaagtattaaaagcttaccaccaatgccagccaagtttgtgccatgatttctaattttcatcttttccatgtagttgacctttaggtccccaatccacaatgtctgcagttaacatagattgttttctatgggccaagactctgggtccatggaggggggtaggaactatggaagggaatccattccatatagtcagcacaggtggggcgactgggccgggaatggttggttagcacaccagttacattaatggaaccaaaacataataagtacatgacttttccatagtgattccaccatgcttgagcttgaattataagacagctactgttgagtgacatctctgtggtgatacacaaagggagtccttctagtggggtggtataattgatgacattgttctaagagtctaactgttctatgccatggggagttaggggtcctggagcccacggtccctgatcatgatagatttcagaaagagcgtcactccaaagtataggccgtactgctgggggattgggaacatatgcccaatatgtttttacctctgtacagggaaaacatactgcacaggacattatggctgacaggccaagaacatggcatcaggggtttttgcctgtccctgacgctccagtagtttctcagcttcttgcatggttttcttgagttgtccccaggttatgggggttgatgtcgttgtgactccggtcagccttctctccgtcttcacactcaggctcagctggctcatgggttgtaccggagggaccaagcccattgttggccaccatgggtccctccagtttcccgttccatggtggcacgcaccttgagggcactcacatggtgtgtccatctcctgtagaaacacaagcataccttcatccccatgtcagtaaatccaccggacctttccattgtccttcttccagggatttccataacactttcagataaactttcctcttttcctctaacacttgccaatgtctttctgctggagtcttaccatccagaccaggagtcaaacaatttaaagtaaataaggctaaatgtaattttatttgaggtggtagctggtctcctataccccctttctgttttttcaacatgcattgtaatgtttgatgtgcccactctataatgccttgtcctcagggattgtaaggtattcctgttttgtgggtgattgcccataactgtaaaaagttttgaaaaacatggctaagtataagcaggtccattgtccgtttttaattgtttagggatccccatatgagcaaatgatgaccgacaatgtcaccgcacatgagcagctgtctcgcctgtttggcatgtagaatgcagcatatgagattaagtgtctatagttacatgaacatagctaagcttgccaaaggctgctatatgtgtaacatccatctgccaaatttcatttggagccaagccttgtggattgcatccttccacaggtataacaccagggacatgctgacaagtgggacaggcttgcgccatagttcgagcctggctgtgaggcaggtgaaacatacgagtaagggcgaggtgttttgaggcagtattgcctgagaagtttgagcttgttgaaatacagaacaaaccagtttatctgctctatcattacctagagatagtggtccagggagttgtatgtgagagcaaatatgagaaatatgtaaaggagcagcatgagagcgaacagcttgttgaagtcttagaaacaagctaagcagttctggctctagtgtgcttttaattgtagcagtttctatgcgactggctacatttacgacataggctgaatcacagacaatgttaatgggagttgaagctgtgagctctaaaactagaatgactgtaattaactctgagcgttgagctgaaagtccagagatccttattgtctgagtatgtttaggtcccaacatagctgcacgccctttggaagagccatcggtaaaataggcctgaccacctggaataggctcgtgatgagtaatcacagggaagataaaataatagacattataaaattgtaaaactttgtccgatggagagtggttgtctattatttccacaaaatctgcaagagcaatttgctacacagtcgatatttcccatgctgtggcctgttgttgggaatccaaggaaacaataattgcgtctggatcataccccataagcacttttaatttatgcctacctatagtcacaagttgtgtaattaaaggaagataggcttgcaaggttttaactgtttgattaggtagaaagagccattctattactgatacagacttgtctaagcactggcccaggagtcctgttggagaatgaggggtatgaagaataagcaaaggcttttgcggctacagccatgaggcatgtctctgctgaagcatctgttctacaagttgcaactcagcttctgcctctttggtcaattgctgcggggaaatctaatgaagaatctccttgcagggtttgataaagatgtttgagtcgataagttgcaatacctagcattgcgcacagccaatgaatatcccctaacaactgttgaaaatcatttaaaatctgtaacctgtctttatggagaactactttctgaggccgaacacttctttcagtaacaatagtgcctaagtaatggtatggggaagttgcttgtactttctctggaccaattttgagattccatttagtcaaagcctgcttcctttctctgaataactgatgtaagatttgatctgtaggagtggccaaaagaatgtcatccatgaaatgaatgatgtgagcagtaggaaacatattcagagtctccttcaatgtttgtcctacaaaatgctgacagcgtaggactgtaaagcatgtcttggggtaaaactttcctttgataaagagaaacaggttctcttggatgaatagaaggcacagagaaggcagatccaggcttatccttctcgtgtaagggtatagtaaagaaaggtctatgccgggcgcaatggctcacgcctgtaatcccagcactttgggaggccgaggtgggtggatcatgaggtcaggagatcaagaccatcctgcctaacatggtgaaaccccgtctttactaaaaatacaaaaaaaaaaaaaattagccaggcatggtggcaggcacctgtagtcccagctacttgggaggctgaaacaggagaatggcgtgaacccggaaggcggagcttgcagtgagccgagatcgcaccactgcactccagcctgggcgacagagcgagactccatctcggaaaaaaaaaaaaaaaagggggtctattgctacaagaggccagtctctaggaatgacggctgcagatggcaagccttgttgtaatgcacccatcagtttaatttgtgcattaatagctctcaaatcatgcagcagtcgccatcttcctgacttctttggaattacaaacactggtgaattccagtggctaaccgactcctctttatggcctgcatccagttgctctttttctactgctgaagttgagttagtttctcctgtgataggggccattgatccacccacacaggtttgtcactgagccattctaatggtaaggcagtaggtgaaggagaagtatcaatgacccccatcagaaatcctgactcctagcccttttctatctgtttgcccacttattgatataggatcagggtttccctgtagggacttttctaagccttttctgctctgatatcccattttagggtttgacccttggctctttttagatttgtcaactactaaattagccattgcttgacctaacattgtagaatgataaagctcagttcctacatcctgagaagctctgagaaaatttcccaactcttctgtatacttcacaggtgctagtgcacatttacaatctacgtttgcattctcaaaagctaaagttacggtttgcatctctgcagccatggtatgaggaatctgtttcttcactgcctcttgtaatctttcaagaaaatgtgcacagggctcctgcaacccttgcgtgatatgtaaaaaggattgtactggaaccccttcctctggaattgtggcccaggcacatttagcagccagtgcacactgcttataagcagcgtctgggagtgccatttgatgttccaggtctgaataagggccattacccaacagcatatcctctgtaatgtctctatgtccagtagcatgattctgtctagcctggtctgcacacatttcttcccaatttaaattccgtgttaggtatgcgctagcagacaaacaaatctgagccaaatgctttacatcaaagggtataaggcgcatagcaccaaaaagagattctggtaatcctaaagtaaatgggctctgtactccattattaactacactagcttttaattccttcaacaacttaaactctagtgggggtgtgttcatgaataaactgctgtggattatttgaatcgggccttatggaaataggaaaaacgcaaggtcctaagggctctccagctatggcagcagagcataaagttgtttgttttggggtctctatttctgctaccgaaggaggcagtacagatgtttctgctattggagggggcggtataggccaatttttatcctccttctcctgtttattattttcagttggtactgtgggtgggacaaaagattctttcagatttttagactcagaatatgattccagctgtctagcagaataagaaggagataacggcagaaggacagtatggactaaactccaagtggagaaaacagaaggatcaacttttagacctttttgatgagcccattttaatccttcacctgctgtgtcccaattttccacatcgaaagtgcctgtctgcagaaaccatgggttatgcataataacctcctgcagcatcttagtgtctgagaactaacctgagcaccagactgtttaagtaaaactttaagcaactgcacataatgttgctcctcaatcccagcactttgggaggccgaggcgggtggatcatgaggtcaggagatcaagaccatcctgcctaacatggtgaaaccccgtctttactaaaaatacaaaaaaaaattgtctcttgctcctcaatagacaaatactgccccatgttaccctgattcagaaacttcctgttcccagtacttctttagagcacctaccttatattgctcccagtacctctttagggcactgatcagtatctctttagggcactgactttatatcagctgccggcagatatcctggggtccccatttgtgtggtgaatttcatttcctctgctccagcaagctttcttcgttcacatcctcaagtccctgttcacggccgccgctttgccatgaaccctactatactgaacaaaggaggacgaacgcgggaataaagacaaagacaaaagaatatgtttggaagaaggggtcgggggcaccttgcttctagtgaacaagggccctgagcttctagtgcccttcgtatttattgattaaaggagatagaagggggtggttgtaggtcagctgcttgatttagagcaggcctgcatgactgcattctttgaacaataggctccagatgtcccagtagataacctcaagcagcacagcgccagggtgattgtcctcagtgtaccttctggcggcaggtgcagacacgagtttgcccacattctgcattgatgataaacagtttactgtatgatcatataacctccagtggaatgctgagttggtcacgaccctcaagtctttggctcccaacccttaggtaggaccttaggacactacacacggttcggcctcattgcttcttatttaaatttgttcatactctccagggtgactggtttgtccctgcattctccaaatatacgggatgcagggcctcaaatcctccaccctcataccacagcctaactcttcaagggcttgcagtgaaatctgtgtctgaacatttcacatgagaggaaagcagagaataaccactagacatttgcctgaaaaatcctttctgcctctcctcctcttatctttccgagacacagacaccttatcaggatgtctttgggatgcggttcctttctggaaactgtacagggtgatgtgtcttcagtacaccctcctatcttttcctggttttgggttttagaactgcctcgggctgactcaagttccccacaactgccatgtctcctggagggtctagtgggtatcagtgcctaggggagtggggcctcccaagggagcagctgaatgccttatggtggcagagatgcctggtatacgcttcatctagataaccaattctctgagttctcagcttctccctcccaactccagtttccattaattggagacacatggctggtcagccaattggatgttgctattgagggaaaacagaaatgattcctgtcttctggattttctcaactgtgaagagagaaatatcccaaaagaagaggaaaggccacttcaacagggtggaacaatagcctgcaaaagcaaaatatacctgggggtacacaggggacacaatgccatgttggtgggaaatcgtcattgagcgcttctcctttcctctatgtgaaatgttcagggaatcaccaccagtcactctcccgtaaaagtatgtgtgctgctcctcctttcatctatcctggaaacagacatcagattgtcttttggttgaggctcccctttggaaacataaaggagtattgtgtctttagtgcactctcctatcttttcttggtcctgggtggcagaaatggggtgacttgcttctttcatgtaaaaatatgcattgaaggtctcgcaataactttgttgcttgacaactcatttagtttttatttttatttatttatctaaaaaatttttttgttttgttagagacagggtcacaaactcccaagctcaggtgatcctcctgcctcagcttcccaaagtgctgggattccacttgtgagccaccatgtccggccactcatttttttgcatcactgagtaacattccattgtacggatgttaccatagtttgtttctttattcatctattgaaaggctcatcttgagcctggtgtgatgcctcatccctgaattcccagctacatgggagactgaggtgagaagattgcttgaggccagcagttagagaccagcctggtagatacagtgtgagaactcctctatttttttttttttaagactcaccttgtttgattctaattttggcagttatgagtaaggctgctaaaaatgtttgtgggaggacttttgtgtggacatcagttttcagttcacttgggtcaatatgtaggaatgagactactgaatccataagaccgtgcttattttcttcagaactccacagactgtctttcaaattggctgtagaattttccattcacatccctagtgaatgagagttcactgtcaccagcatttggaagtatcagtgttttggatttcatctaccgcaacaggtatttactgttacctcattgttgttttctgttgtttttttttttcttcttttggagacggagttttgctctttttgcccaggctggaatgcaatggcgtgatctcagctcactgcagcttctgcctccccagttccagtgattcttctgcctcagcctcccaagtagctgggattacaggcatgtaccgccatgcccagccaatttttgtattattagtagagatgagattttaccttgttggtcacgctggtctcaaactcctgacctcaggtgatccacctgcctcggcctcccaaactgttggattatagacatgagccatcgtgcccagcctgttttcatttgctctttaataacatgtaatgtagagcatcctgtcatatgtttgtttgccataattatgttctttagagagaggtatgcttggaaagattttgctttttttttttttttttttttgagttgtagtctggctctctggcccaggctggagtgccgtggcacagtctcggctcagctcactgcaacctctgcctcccaggatcaagtgattctcctgcctcagcctcccgagtagctgggattacaggctcatgccaccacgcccagctaatttttgtatttttagtagaggcggggtttcaccatgttagccaggttggtctcaacctcctgacctcagtgatctaccctcctcagcctcccaaagtgctgggattacaagcatgagccaccatgcccggcctttttattttttgattagttggcttttttcttatagaattctaggagttcttcatatcttttgggtaccagtccttgatcagataggtgtcctgcaaatattgtgtcccagtctgccacctgtctttttattctcttaacagactcttttcccaaacagagttttattttgaatgaagtccaatttatcgattttctcactcacagatcatgttttttgtgttgtgtgtgaaacctgattgccaaatccaaggttgtcttggttttcacaagtgttaagttctagaagttgtgagttttgcattttccatttaagtaaatgattcatcaggaggtagttttgtaaaaggttcagttctgtgtctaattcatttctttgcatttgctaatccaggtgtttcagtaccatttgttttgtgccaccatgtctaattatttattttattatggatacagggtctcactatgttgcccaggctggtctcgaactgcggggctcaaatgatctgtccgccttgacctccggttttgcatttttaatacttgtctttatagtagatttttctatgttcctagtgcctctcttgcgatcatatggaatcttctcttgtatatttagtttattaagtgtttttaatcatgaggagatatcaacccatttatgctagaggttgcaattttttgaattgcagacgtgtgaaaaatcagactttggtaatgaccttgagcagtaggatacaaataactcccacatgcttagcgttccagaaatggaacagtgggctcaaatgggttaaggcttgtcacatgccttttctgcctctattaggacattcttctcattttttgtttgatttgagatggagtctcactctgtcgcccaggctagagtgcaatggtgggattttggctcactgcaacctctgcctcccgggttcaaaggattctcccacctcagccttccaagtaacagagaatacaggcactcgctgcacgcctggctaatttttgtgtttttagtagagatggagttccaccatgttagccaggctggtctcacactgctgacctcaagtgaaccacctaccttggcctcctaaagtgctgggattgcaggcataagccaacacgcctggctgctaccgtgatttgttatcaatacttactataaaacaaaacttaaaaattatcagcttaaggaattttacatgtacaattgagataggttgacaaatctatgtaagttctctaagatgaattctgttgtattttgccttttgcaattatcctgatgtttcatatatgtcgtagtatgggccaagatattgttttctttctttcttttttttttttgagatgcagtttcactcttgttgcccaggctggagtgcaatggcacaatattgactgaccccaacctcaagcaattttcctgcctcagcctcctgagtagctgggattacaggcatgcgccaccatgcccggctaattttgtatttttagtagagacaaggtttctctatgttggtcacactggtcttgaactcccaacctcaggtgatctgcccgcctccacctcccaaagtgctgggattacaggcatgagccaccgcaccaggccaagatgttattttctaagactaaataatattccattgtatgtatatgcttaccacattttgtttatccattcagccatcaatggatatgtgggtggctgcattgctcattactgccaccccaggaaggtcgtatagtggttaaatctgtgctcattacacctgggtatctcttaggagtttcttgtttgccctcttgtgtaattacggtcttgtttttttcagtaatgtcctgtttgcccttcttatcagcatctatctagctacattctgacaggataactgcaaactgaatgattcctgggcatcataatggatgtttctttctacttaggtgtctcccctcctctctgcttatatctagcatgcctgttttgggtggtccctggggttgtgggatttcccaggggctacccttcctgctcttggctagatatctgccttctctaacaatgtcatcaaagattacactttgggaacaggcattttcaaggatacacagcttcaggactgctaatgttaacttttttctgcatattaattcatagtactctgttatgacaggtgctacagacccacagtccaaggagacattagggacagcccaagcagctgacagagcgatacactatcacaaaaaaaaaaaaaaaaaaaaaaaaaaaattgctgtctgggtgtggtggctcatgcctgtaatcctagcactttgtgactctgaggcaggtggatcacctgaggttgggagttcgagaccagcctgaccaacatggagaaaccctgtctctactaaaaatacaaaattagccgggtatgctggtgcatgcctgtaatcccagctactcgggaggctgaggcagaagaagcacttgaaccccggcagtgagccgagattgcaccattgtactccagcctgggcaataagagtgaaattctgtctcaaaaaaataaaaaaaaaaattgctttatggaagaaagtaagtatagacagagagaaagggatctgatgaccaaagcagggaataaatgtttggagtccacggcatcctgagaacttcttgggaatagagtctaggcccccaatgctgtcactctcacccatcctcctctacacatgtgagatgtttcaggacccagtggcttttaaggatgtggctgtgaacttcacccaggaggagtgggctttgctggatatttcccagaagaatctctacagggaagtgatgctggaaactttctggaacctgacctctataggtaaggatgacaatattccttccctcagtgcattagtttaccaatgtttctagctcaccaatgctgttgagtgatttggaacacagacaggaaatactttgatgaataaatgaggcatggctgctgtaaatcatgggcataggtctaataattttttcacaattttatactgcctcaggattatttttctgtgtttgtattttaggaaaaaagtggaaagaccagaacattgaatatgagtaccaaaaccccaggagaaacttcaggtaatttgcacttataagagaaagcagtgtctctctacacgatcttagaatatgagactatgttaaaaataagtaaaacaaagaactaagtccaggatcaagttcatttattcatacaatattttatctaaaaatatatatttaaatgtgatcaaggctgagggctcactcctgtaatcccagtcctttgagacatggagataggaggatagcttgaggccagcagttcaacaacagcctgcgcaacataacaagaccacatatcaacaacagcaaaaaattagctgggcattgtggtatgcatccgtagtcccagctactcaggaggctgagacatgagggacatgaggatcacttgagcccccaggagttaaaggctgtggtaagctatgatgataccactgcactccagggtgggcaacaggacaagaccctgaaacaaaagaaaaatgacacagagtatttagtattttaaaatagtttacatgggaagagtattaagaagccccatataaacatttttttaaataataggtatggctaggtcaccttgtagaatgtgttgtccagtcaccttcaaacaattcagacagggcagaaagcctacactttgatggagagtgttaaaaatgcaagtacaatacttgctgattaatataaaattacttataaacaaactcttcataatttgtttctcatttttgacaggagtgtcacagaagagaaagtcaatgaaattaaagaagacagtcattgtggagaaacttttaccccagttccagatgacaggctgaacttccagaagaagaaagcttctcctgaagtaaaatcatgtgacagctttgtgtgtgaagttggcctaggtaactcatcttctaatatgaacatcagaggtgacactggacacaaggcatgtgaatgtcaggaatatggaccaaagccatggaagagtcaacaacctaaaaaagccttcagatatcacccctccttgagaacacaagaaagggatcacactggaaagaaaccctatgcttgtaaagaatgtggaaaaaacattatttaccattcaagcattcaaagacacatggtagtgcacagtggggatggaccttataaatgtaagttttgtgggaaagcattccattgtctcagtttatatcttatccatgaaagaactcacactggagagaaaccgtatgaatgtaaacaatgtggtaaatcttttagttattctgctacccatcgaatacatgaaagaactcacattggagaaaagccttatgaatgtcaggaatgtgggaaagcattccatagtcccagatcctgtcacagacatgaaaggagtcacatgggagagaaggcttatcaatgtaaggaatgtggaaaagcattcatgtgtccccgttatgttcgtagacatgaaaggacccactctaggaaaaaactttatgaatgtaagcagtgtgggaaagcattatcctctcttacaagttttcaaacacacataagaatgcactctggagaaagaccttatgaatgtaagacatgtgggaaaggcttttattctgccaagtcatttcaaagacatgaaaaaactcacagtggagagaaaccgtataaatgcaagcaatgtggtaaagccttcactcgttccggttcctttcgatatcatgaaaggactcacactggagagaaaccctatgagtgtaagcaatgtgggaaagccttcagatctgccccaaatcttcaattgcatggtaggactcacactggagagaaaccgtatcaatgtaaggaatgtgggaaagctttcagatctgcctcacaacttcgaatccatcgtaggattcacactggagagaaaccctatgaatgtaagaaatgtgggaaagccttcagatatgtccagaactttcgatttcatgaaaggacacaaacacataagaatgcactctggagaaagaccttataaatataagatatatgggaaacacttttattctgccaagttatttcaaacacatgaaaaaattcacactggagagaaaccctataaatgcaagcaatgtggtaaagccttaattgttccagttcctttcgatatctaaaaggactcacagtggagaaaaactctatgagtgtaagcaatgtgggaaagtcttcagatctgtcaagaacctttcaatttatgaaaggacacacactggagagaaaccctatgaatgtaagaaatgtggaaaagcgttccataatttctcttcttttcaaatacatgaaagttgcacagaggagaggcgccctaagaatgtaagcattgtgggaaagcattcatatctgccaagatcgtttgaatacatgcaaaacacacactggagagaaacctatgaatgtaaggaatgcaaacaagcattcaattatttttcttccttgcatatacatgaaaggactcatacgagagagaatccgtatgaatgtaaggattgtgggaaagcattcagcttgcttaattgctttcatagacatgtaaagacacaccagaaggaaaccctatgaatgtaagcaatgtggcaaaagctttcacttcttccagttcttttcaatatcatgaaaggactcacactggggagaaaccgtatcaatgtaagcaatgtgggaaagccgtcagatcagcctcaagacttcaaatgcatggaagcactcacacttggcagaaactctatgaatgtaagcagtatgggaaagccttcagatcggctaggattctttgaatacaaataatgaatgtaaacaattaactgtttataataactgtatactaacaaatgttattctttttaaataattaagaagctataataaaatatccattggtgtcatgtattagatcaagcttataatgttacattgttattatttggatattgtgaatcagcattacctggattaaatgccaggcatatttttcctcatgtaaactttacttttcatgcttatgtactttaatttttatttcaactgtaatttttctttttttttccttttgctttttctttttcttttttttttttttttttttttagaaagagcctcactctgttgcccaggctggagtgcagtggtgtgatcttggctcactgcaatctctgcttcccaggtttgaacaattctccttcttcagccttttgagtagctgggactacaggcatgcaccacttcacccagctaattatgtgtattatttagtagagacggggtttcaccatattggccaggctggtctcgaactctggaccttgtgatcctcctgcctcggcctctcaaagtgctggatttacagacatgagccactgcgcccagcctcaaccctaatttttctttcactcataataccaaaagttatctcatgtatctctgagtaccttcttgcccaaaaccagcagcgccatacctgctgtcagcaagggtgtaatataccatagtgataaatatgaccagaagacataaatgactgtgggatgtatgagaattacaagtcacattggtaagaagataaaaattttcgtcatgtttatgatttgaaatatgtttacttctatcagttttagaaatacagttacaaaatgcccttgtttttgtcctggtccatcatgatcactgaggagcatcatctcatatgcctgatatgtaacatgtgtctctccaacagtaaaagacttggccttggctgggtgtggtggctcacacctgaaaacccagcacattgggaggctgaggcaggcagatcacctgaggtcaggagttcgagaacaccctgaccaatatgatgaaaccctgtctcatctaaaaatacaaaacttagtcagccatggtggcatgcttctgtaatcctagctagtcaggaggctgagaaaggagaatcacttgaatctggcaggcagaggttgcagtgagccgagatcccatcattgcactccagcctagtcaacaagagcgaaactctttctgaaaaaacaaaaacaaaaacaaaaacaacttggccttgtggtgaggggaggtcagctatagacttctggacctgtttttgccttacttattctgtaaagactaaaacattttctaaaatgtatgggcactgttaactagaaggtaccttagttaaaatatataaattcatttacgctttataaagctatatttttttcaaattgctttactgagtcataggaggctaataaatttgtgtaaattgtctaaataaaagcctttcttcctctgataatgtgctgttgatgctaacttgtcaacagcctgcttatctcagcagtgtaaagttaacggtaacatggaaaagtcacttttatatataatgcaatggctagaacaattctgtcacttcctgtaaggtccagtgaagctgctcttcagaaacagttatttaaaatccttatagtctaaatctaggcaccacaggatgcagaatcaatcactgaccaagccctgtctgtgtgtggaggtgacacacccagtcccagataatgtatccacatcagtgaagggaggagtcattgattgtcggatcacacaaagtaactcagaacagggaagacagggcagtgaaacctggccaggcatggtggctcacacctgtaatcccagcactttgggaggccgaggcaggtggatcacttgaggtcagcagttcaagaccagcctggccaacatggtgaaaccctgtctcgtctaaaaatacaaaaaaatagctgggcatcatggtgtgtgcctgtaatcccagctactcaggaggctgaggcaggagaatcgcttgagcttgggaggtggaggttacagtaaactgagatcacaccattgctctctccaggctagtcgacagagcgagactccatcacacacacacaaaaaaagttgggtgcacctgaatccaacccctgcctcatccttctgaattgaaggccaaatgcaccctgatacttttcaccaaagagtagaaacaacaccattcacttgaccccaaatgtgactttccacaggatgcaagcacagtgttggaatagccaatgacagtgacaatagaagtgcagggtgagggtgatgaacaggacacactggagagcctgacattaggctagatattggggtgtcttgatgcttcacaaagagcccaaggagcaccccaaagaggacactggagcacaggcccaaaggatcttcgtatgccaggaaggccactaattttggaagtcagtgatgttggtgggtttagctttgggaaaagaaatagggaaaatcttttcttacagcttgagaaaaatgaataaacttccacaacaaagtatagtagataaattggtgaattacaaagatttagcaaaatatcagtcctcctttgcaagttggagaacttgtaacagtggataactcttctcttcctattatttgtgaggtaacacctggctggcaactgttgtcatatgtttgtgttcacatgtgattaatatgtagtatgggctttgttatcatggaaatcataatgaaataatattgtccaccttaataagataacaagattcagagaagatgattaaatattgagtatttctgagcacaaagtttgaggatagccactggggaaacagatatcctgaagagtggggtcagtgctccaacacggggaagttgagtcttcacttctgtagggcaaaatgtagacgcttaacagggtgacattttccatacaaggccagtgcacacatttcagtgatttggttggttgcagctaccaaatttcaatgatgattgccttaactttttgtaaggaggggtagtggtctcaaaaggatcctacctctgtcacttcccactcttttctaatcatttacagcccaagaacaacaaagataattaatctttttgatattcacaggaaaggagctattacatggtagtgtaaacacatttctcaatatgtttattgactgaaagggttagatacttttactttccctcatgagggatgaaaggtaagtaccttataatttccttctagcctataaacataaaccgagtttgagagattttgctggattcttcaaacgctgggtattttctcattgaaacagaggccagagtccagtgactgcaagctaaggacaatgagaagcctacaaagagaggttattgaaagctcacgtcaggcggtgactcacacctgtaatcccagcactttgggaagctgagtcgggcagatcatctgaggtcgggagttcgagaccaacctggccaacacagcaaaacccatctctactaaaaacaccaaaattagccaggtatagtggctcatgcctgcagttcccagccattcaggaggctgaggcacgataatcgcttaaactctggaggcagaggttacagtgcaccaagatcgtgccactgcacttcagcctaggtgacagagcgagactctgtctccaaaaaaaagaaaaaaaaaaaaagctctcacttggttcttcccatggtgcccccactgcaggtgtaccagctactcacgttgaccatgggaggagccctttataataaaagaatctcagaatcctggaaagctggggatccacaggcagatgcagtagtcagtgatgccgtgcgcaagtgataatttttgtcatggggctttttctagacacttctagtgaaacaaatgtgggtttaggtaagaaataacttttaattctagaccttgaagtcagcttgtcattaaaagaggtcatttaaaaaaaaaaagtctaggtactggacttgtaagtaaaaataaaaagattaaatacctaaaatggggttgtatataggcttagaaggagtcagtcaaaaattcaggggctgctgggcgtggtggctcatacctgtaattccagcactttgggcagatcacttgaggccaggagttcaagaccacccttgaaacatgggtgaaacacccagcatagtgaaacaccatctctataaaaaaatacaaaaattagctgggcatgatggcacacacctgcaaccccagctactccggagaatgaggcatgagaatcacttgaaccagggaggcagaggttgcagtgagccaagatcatgctactgcactccagcctgggctacagaacaagactctgtctcaaaaaaagaaaaaaaaaaaaaaaaaaaaaaaaagttcagggacctggaggaaggagagaaactgaagcatgctttgattaatagatatttcattttgactgatcactaaagacaaagctattcacctaatggtttgtgaggtgaatactggaatttctagtctgtgtctggtttgtcataggtaacaaacgtggcatcatctaagtcataaggggaagggtgttttgttgtagtaaggtgctcttgcacaacacaaaggatgggggatttcttgaatcacacctcttttcaggatgacccacccacccccatctccttttcacaccccttactctctttgatttggctgctcctgagttgtatccttcataataagttggtaaatgtaagtgaactgtgggtagttctatcaaattatggaacttgaggaggctgttgtacaggacccaggtctagatgcagttgctgagaagtacaggtggcccctggggctttgagtggcatctgctgagtggggctgtgttgggtgagccaggaactcatggagtctctgctaactctgggtggcttctgaattgagtggttgcatgactgcttagtgctggagaattcgctggtgttcagcaagcaccacacatttggtgtcagaaaaaaagacagcataggtcagaaccttccactgactcacagtgagcgagtggtctttggtgggcattgagaccccggtggaaggactgtgtccacactgtggggaggggccagcagggtgtgtgtggaagtcccagaagtaattttctggctgctcacatttccctcacacactacctaagagtgggccagcctggcctgtgtctccacagtcccagtggttcctaagcttgggaatgtgtaactattggagtgtgggtttccttgtgagctgtgggtgaggcaggctgcctacctgagctgcctcccttttgtttcttttacaaaatcttgctgccatggaattgctctttccccacgcctctgagaatttattttattttatttacttatttactttatttatttatttatttttcacacaaaatctcactctgtcgctaaggctggagtgcagtggcgcaatctcggctcactgcaacctgtgccctccaggttcaagcgattctcctggctcagccttccaaatagctgggactacaggcatatgccaccacaccctgctcttttgtgtgtgtgtgtgtgtgtgtatttttaaagttatggcaagttttcaccgtgttgaccaggctggtctcaaagtactgacctcaagttatccacccacctcaacatccaaagttctgggaataaaggcatgagccactgcacctggccacatctaagaattttattctatgatttgcatgttaggattttaattagctggttggaaacttagtgaatattttgataatctttgaagaaggaaatcgagttcttgaaataagctgttttgtgccaagtcaaaataataacaatatgaatactcagagacatatcaccccaaaatggataggccttgggcagttctggtgtgtctccttggtctcacttatttttcgtatgcaaaggtgatcaaagttttgattccttttgttattttttgtagctttgtcatctctttgtcacaaagcagaattttgccacctttgaattttcagtaacataatactaccattaatacaccattagtattatgctgagagggtgtatttctgggtttttccctgagcctgttgcaaacatgctgctgtgtgaagttgtgggtcatgtaattgacttgcctatttccctgcttaatgggacttgagttggttcaagtctatctttgttcttattgacaattctcttcttgtttttgttcctaattggaaatacaacacaaattcttacatgttgggaaaaaattgctgggttgtagattatgaataaatacaaaattactaggaaatgtcgacagagtatgaatgtaacttatggattaaccatctcacctttcatagatgtgtctttattcttgtgatttgccaacactttgaattatctaacgtactttttattgcccatttactctgaaacacaatctctgtgtgattacgtattgctttttactggttgccattggtttagcatttttcctatatgatctttcatctcctgtttagctgtttccagtcatcctcttacatttgactaattggtagttatttttctttctttttttctttttttgttaatttgacacagccttgctctgtagcccagctggagtgcagtggtcactcactgctccctgcagcatcaagctcctgggcttgagcaatcctcccacctcagctttctgcccagctaattaaaaaaatttttttgtagagacaggggtctcactgttttgcccaggctgctcttgaactcctgggctcaatcagtcctctgccttggcctcacaaagtgctgggattgcagacatgagccactatgctcagcaatagggttttttcttttttttaaaccatgtttctgaccaatattttattaaaatctttaagaactgcatgctaacaaaggttattctgttctgtttttcattttctgttttacattttcattatgattacttgtttttcttttttattctcattttttcctagataattacaatacttttccatgtagtggccctggcatgcattttcatccttcatgcaatcatacagctacctcgatgtcccttctctctgccattctgaaattggacctcactcctttgtgactcttgctccccatctgctatgtgataaagtcctgtctgattacatcgtctccaaagcctctttttggacttctgtttaccccttggcatgccctgcatttactctcttcaaaatatatacttagaggccgggtgcggtggctcacgcctgtaatctcagtacttttggatgctgaggcaggaggatcccttgtgcccaggagtttaaaaccagcctgggtcacatagggagaccctgtctcaaaaacaaaatttatagttacaagtcctaaaccccaacagggtcatatttggacacggaccttttaggagatcacatacatttataaaggagggctctcacaatgggattagtaagagagagagagaactctgcctctccagcatgtaaggacaaagcaagaaggcatctagctgcaagccaggaagatagccttcactaggaacaaaattgttggcagcaagatttcagacttcccaagcttcagaactgtgaaaaacaaatttctgctgtttaagaaactgagtccatggtactttgttatactagcctgagctaagtcaccccaagagtcctcacattaaccatatactgtcgtacaagtgctgcatttggatctacctgtaatgtctccaaatctacttttccttttggacccattgtgagaacaggtttgcctcatagacaactgctggtgatattagtgatagcctaccaactagggactaaaaagaaagtttttcttttttttttttcttgcttttttttttgagatggagtttttgctctgttacccaggctggagtgcaattatgcaatctcggctcactgccagttctgactcccaggttcaagtgattctcctgcctcagcctcccaagtagctgggtttacaggtgcgtgccaccacatccagataatttttgtactgttagttagagatggggtttcaacatgttggccaggtggttctcgaactcttgacctcaggtgatccacctgccttggcctcccaaagcactaggattacatgcataaaccaccacactcggcctctcattcatatgtgtgtgtatattctgtttttaataaaaatagagactaggcctatgttgccccgtgtggtcatagcccaaacttttgggctcaagcgatttactcacctcagccacccaaaatgctgggattaaggcatgagaaactgtgccagggcaaatgaaagaaacttagtgggaggccaggcacggtggctcacacctgtaatcccagcactttgtggggctgaggcgggtggatcacctgagctcaggagttcaagaccagcctggacaacatggtgaaaccacatctctactaaaaatacaaaaaaattagctgggcatggtactcccattctcacagtcatgcaaaggctctttcttaaggattccacctgctggaaagcattatatactgcctgcactgactcaagagtgtctggtttcatctccatgtcataattacaaccacaatcctaaagggactgatttaccacactgtggttgccgtaagtcccaaattgtaccctcagcagcaactatatcatcccaagtcacagctctaccctctaaaggtgtgcctgaggcttgtgcctgccatactaacacattaacctgtccaaagcttccttcagagctgtgtcccagtcccaaagtgcccctttctaaaacattgggctaagtgtcagataaatgctctccaataatccaaagaccaacaaatgtctggattttttttcttaagagaaatagtatggctctgtttcccaggctggagtgcagtggtgggatcatagctcactgtagaaactcgggctcaagggatcctcctgcctcagcctcacaagtagctgggagtaaaggcacatgccactatgcccggctgtttttaaattttttgtacagatggagtctcactctattgcccaggctgttcttgaactccaaggctcaagtgatcctcccacctcagcctcccaaagtgctgagattacagttatgaaccaatgcacccagaactcaaaaaggaatatttataagggaaaatatctaatgttcaaattgttatgtatagagcagttaacgggaactatcatttagggtctatgggattctaggacactaggtatgaaacaaatatgaggaaggtcagagaacaagctgacttgatgattaatgctgaaggtgccgcaagcttggtttaagttttcctcctcccatcctccctgatgaatttgataaagtttaaagggatggtttcaccgggggctttttccactgactgcaaggaggtgatcccgcttggtaaatcttcagtaggccaagcctcttacgtggctagaatgatccagtccataaggaaatgtcaccacctgctgtattttacactttgaccatcaaaggggtacagggtttccccagggagtttggtgggattttaattttttgtttgtttgttttgagacagtgtcttgctgaagcgcagtacccaattatagctcacagcagcctcaaactttggggttcaagtgactctcctgtctcagcctcctgagtagctgagactgtaggtacacacacttctccttggtaattaaaaattttttatggagatgggagggtctcacttcacggctcagggtggtctccaatctcgggcttcaagcgatcctcccactttggcctcccaaaatgttgggattacaggcgtgagccatggcacccggcctcccaggctgttgtttgaaggtctttgcaatctctaagagttctgcagcaatttattccctgacagtgagagtctcatcctttgaccccattttgccgcagtagctgaacgttcacttttctttccataagggggcgagcttgccagtgaccctaatccctctcctcatcgatgacttctttgtcatcagagccttcctcttcataaattcccacggaatccaagttttcacgtcccaatcgggcttagttatgatagccacaggcccacaccagctgccacagcacccctgtcccatggaaaccgcctgactctcttctccccaagcgtcctgtcccaggagcccccatcatctctgctcccccgggctccaggccctagagccgcgctgctgcagagcccggttcccagggctgctccctccatatatccacattcatctccagctctccaccctctctccaaccagccaggcccggaggtactgcagtgtcactgaacgtgcgtccctcagctgccacctccaccacgatctggaaatcttttaaatgcacttaagttatcttagaattttccttccccactttatacataaacataggaggagagcagggactctgctggtgtcttattcacacaatgggattgagggtgtttgtgtcatggaactgatcaatggggtgagaagtagctgaataacctgcagggggcagcagagcccgaggccggtgactcaacgctgaggccagtgtggagcctgcaaaggaagggaaaggagcctttcctgggggcttccgggcagcccgccctcccctacaggtggcctccaattgctcagagcagctccagaaggagtgcggattccgagaagctgaagagccctggaaagcagaagacccacatgcacacgtatgtgtgggggttctgtcctttctggtgttgtacctctggagcctggggctgtcttctgggcagggtttggggtttgacatgcatggggccactggggtcagatttgtaagatacagtgaatttctttaagtttttctttaaagatttagcctgctaacttcctcgtcttttgttctcaaactcaactttcctgttcctccttgcccctagttactttaaaacagcctaccccgttcccatcagctctaatcaataactcacatctgttcccttggttacctgtacccattgttcccccaaaactgcacatctcacatgctccacctctgtacctcacatccccctccccttctatatttagaaaaatatgtacaagcagccaatcgggtcagctcagactgtgcggtccgaccccagcccatgggggagtaacacagagatagggaccgcattaaggataaaaacctcctggtctcctttgttctctgtgctcttgtgatcttgattgacgtgagtggcacccttctgcagtagtaaattgccttgctgagagaattaaaattttgcctgagtgctggttttacttcacggcaccaagcttttattccgggagcattttatatccaacaattctaggggatcgtccgagatccccatgctccttttggaagagttcttcagtcaccctaccctggggagacgcgtcccactgccccattgcggtggcctcagggacaggagatcgagacccacccattttgacgaataaacccggactctcagcaacgcggggaagagaggcttgcaataccgcagcgaccaggtaaactctgtgcacagaccaaggtgggaaacgttgcaggggcaacaaagtaattctttggtagtcggaggggtgtgtcagggcattctgggggttgaaagtgcatgaatggtaacaagcactactgctgtgcggagcgagtgagtccaatctgcggttctgtggtcacctcacacggcttagggcagccctgcgggggtcctgtcacaggtttatacggacctgccatcaatgctaagaggaacctgaaacaaacctgcgagggaagcggccagagtggatgaagcgaaagaagggtgcaaggaacctccagcaggtggagctaaaggatagtggaattgagccttagccacacttccagtgagggataggcaaaagacctcctaatatgaggggttgagccacaaggaaccccccaaataggcaagagatccttaatttgagaggctgagccacaaggaacccccaaaataggcaagagatccttaatatgaggggttgagccacagcaagcccccctaggcaagagattcctatcacgagggattgagcctagccaggacccagtataggaaatattacaagcaaaaaagacaaagttagcaacaaagatatcccccctaatagtcccctaggtctcatgttaaaacattagaaagataatgaaaagactaaacataagaaaaagcaattagtgataaaatattgctgttccatttagactcaagaacgaatccttgaacccttagttttctggccagaatttaagtcgaatgagggatggatttgtgaacttctaatagaaaatgttgctagtagaagacctgcctcctgagaagaaacaaattatgccctatgttagttgcaaggagttgtcctttcccctcctccaaggattgaaaggagcaagtcaaaaactaatatttggaggaaaatgagttgtacatgtgccctattaagatagaaccatctttaatgaaaaagacagtgaaggaaggggcttgggggatcctagcaaaaagaacaactcgcaagatcccctagaccattccccacctaatacccaacccttcccctcaggcatcgcccagtaagtctgttcttccccagcctaagtccctctcccctaaagaactccaagctcctaattcaccagatggcttttgccaggctagcaacatgaaggatctgccgcaacatgttgtcagcgttgtctggcccatagtgcacccctgcagcggcaaagcccatgctcctgcccactggctggtccaaggtcctggcactgtattgacggcagctctgcatgacatgcgagccaggccccagcctatgccccatgcaaactacattataggatatctgccttactttgctgaggctaagtaatacggggcttcagcgatggctccaagcagcctggcatccccgcagctaagtttcctgagcaagaagtagataatctttcagcggatatatccactagcatttattatagtcaggccagtgttaaaagtgaaaatatccaccagaaaagaactctgattctttaaagtcacctatgttaaaatgtaccaccaaaaaagaattacatgtgtataaatatgaggctattctgttaaaaatgatagtttaatgttactagtaatttgcttaacctaacaagtttcttaacgaaagatccaaatctaaaaaggaagcacacatgtttagatttaactgattaccatacaaatgtccggccaaacttaagagaaacccccttcaaaaatgattaaaggaaaaaggattcaacagatgttcaataataaatagagaagttcctagagaaataaaatttaaaaattgtttaatagtttacccaaatttgtaagctgtttgcacttagtcaagctttaaagtaactgcaaaggaaccatctatactaatctatattgattctaaatacacctttatcgtggctcatacatttagaaaatttcagacaataataaaggtcaaagccttgttcatgaagagttaataacccaagtgttaaataaccttcagttaccagaaaaaaaaaaaaagctattttccacgtccccaggcaccaaaaatcctatctttcaagagttaagaaaataacctagcaaatcagataatccgaaccagctgccgtttctcctgtaggcactgaagggaattcaaatgttatttaaacctcttatgaaagaagtcctatcccacctaaattagaggacccattaaagacctcaagctatgtatagcacagttaaagtttatatgtgtatgaaaatgtacatccttagccaaacaagtctagaaacttagttgccataactcaaatgtcttctgtcttcctattaatccaaactacctctcaaagcaatccactgccaacattcctacatacttggtttatcttccactttctcttccctcaaaactcacaattttccagtacaggtgcggctcctggagttcccagtgcgtcaacaccggcctgaggagctggcctagtacttcccaccattgaaactgcagtctggacagcagagaaaggatagacccatcacacccgagtcaagaaagcaccgccacccccaaagtcgtaggccattattccaggggaaaaccccctcaaactaaagctaagaaaaatttaacctcttacatctattctattactctttcttcttttccccttccaatgctgaccaccttgtcattaatgtaactcaatcaaactcaccccaagttatcacgtttaatgctatgtctagtcataccctgtaaagatctccaaagtcaaagacaagtctcagcctcagaaaagtatctctgcccctttaaggtgaaaggccccccctaccaagactcttgttccttaacaaatataagaaaacaagtctgtcatagctagaatgatgtcctatggacaaccaaatgtcaaggctagacctcatcagcaggtggctgtatatccttaaaaccatacattcatttcactaaaaaaagcacctccccaattgccagtataatcaatgtaatcccatacaaatttccacctctactgaccctaaacctactttaagtcacttctatggaacaggagccaacttggccagcacagacctcataagatctttcgaaatgcgttttattaatccttcattctcttcacccccttccttctcttctccttctaagctttcttctaatcagactgccacctgttttctacctaatgatactactaaagtaaatattgtagaagtaaaagatttaagacaaaccctagcaattaaaacaggatatcaagatgtaaatacctggttggaatggattcaatattccgtccgcacattgaacaaaagcaattgttacgcttgtatgcatggcagactagaggcccagactgtttcctttccactaggatagcccttcagccgaccaggcataggctgtatggtagctcttttccaaaattccacagcctggggcaacaaatcatgccaagctctctctctgctatatcccgaagtccaacaacctgcaggccagcccccaaaggccattcagcttccttctcctgacgtcaatttcacctcatgtctctcacgacgaggggagaatctggcgttccttagaagcttaacaagatgcaataagcttaagcccttccaaaaacttacccatcagtctgcccttagtcatcctcaagcagatgtatggtggtattgtagtggacctttactggatactctgccaagtaactggagcggcacttgcgctcttgtccaattggcgatccctttcacactggcatttcatcaaccaaaaaaaaagaaaagccacaacaccaaaaaataagagaagccccttataagtcttttgactctcaagtttacataaaggccattagagtcccatggggagtgcctaacaagttcaaaacctgagaccaaataactgcaagatttaaacccatatttccccgaataactattaataaaaatgtagcttcgataaattacatctattataattagcagcagtttatgaattacaccaaggatcttatcaaaaaacagctgaccagttaaggcctactagccaaatagcttaagaaaacagaatcacttgactgggcgcggtggctcatgcctgtaatcccagcactttgggaggccaaggtgggcggatcacaaggtcaggagatcgagaccatcctggctaacatggtgaaacccccgtctctactaaaaaatacaaaaaaagtatccgggcgtagtggcgggcacctgtagtcccagctactggggaggctgaggcaggagaatggcgtgaacccgggaggcagagcttgcagtgagacaatatggtgccactgcactccagcctgggccacgaagtgagactccatctcaaaaaataaaaaccagaatggctccagacatgttattagccaaaaaaggtggagtttgtgttatgattaaaacccagtgttgtaccttcattccaaacaacactgcccccagtgagagcataacaaaggccttgcaaagacttaccgctttatccaatgaattagctaaaatttctggagtcaatgaccctatttcaagatggctaggaaagtagttcagtcaataaagaatcatagcctcaatacttatttcttttacagtcgtaacaggtgtacttattcttgttaggcgttgtgtcataccatgcatccgtaggctaatacaaaggattgtacgaacagcatttactgaaacctcccttagttctcctccaccttattcaagtaagcttttccttttaaaagatcaaatcaaacagcaaagccaaaacacgttaaaaaagtttaaagagaaaaaatcataagaaaattaaaagggaggaattgtaacatacagtaaatttctctgagtttctttttttttttttttttgagacggagtctcactctgtcacccaggctggagtgcagtggcgtgatctcggctcactgcaagctctgcctcctgggttcatgccattctcctgcctcagcctcccgagtagctgggactacaggcgcccaccaccacgactggctaatttttcgtattttttagtagagacggggtttcaccatgttagccaggatggtctcgatctcctgacctcgtgatctacccgcctcagcctcccaaagtgctgcgattacaggcgtgagccaccgcgcctggcctctctgagtttctcttcaaagacttagcctgctaacttccttgtcttttgttctccagctcaactttcctgttcctccttgcccctagttactgtaaaacagcctacccccttcccgtcagctctaatcaataactcacatctgttcccttggttacctgtacccattgttcccccgaaactgcacgtctcacacgctccatctctgtacctcacgttcccctctccttctatatttagaaaaatacgtacaagtagccagtcgggtcagctcagattgtgtggtcgaaccccagcccatgaaggagtgacacagagatagggaccgcattaaggataaaaaaacccccggtgacctttgttctctgtgctcttgtgatcttgattgacacaagtggcacacttctgcagaagtaaattgccttgctaaacaaatgaaactttcccctaagtgctagttttacttcgtgggaccaagaatttattcctaaagcattttatatccgacagagatattcatatatataaagaaaatgtgggccaggcgcggtggctcacgcctgtaatcccagcactttgggtggccgaggcgggtggatcacttgaggtcaggagttcaagaccagtctggtcaacatggtgaaaccttgtctctactaaaaatacaaaaaattagccaggcgcggtggcatgtgcctgtaatcctagctgctggggaggctgaggcaggagaatcacttgaacccaggaggcggaggttgcagtgagtggagattgcaccactgcactccagcctggggggacagagcgaggctctgtctcaaaaaaaaaagaaaagaaaatgtgtgaagatcaggctagagacagaaatgtttgggagcgtcacctggataaagggttcatgaagttggcagtttatttaggtcaaaagcttaacttaacccctggagagagtttcctgctggtgaaaatgaagatctggaaggaggaagcattttcacactgtgaggaggggatgggggtgtgagagcaagtcttagccatgcctcatccccagttgcggcccgctccaagacatatgcctctcctcctggcgcagtcgtgtctggcctggtctcggttcccctgctgctctgaggcaggagatggctcctgtggacactgaatctgaaattccctgcacactcctgtgaccccatgcagaacgaaggagcagggacagtcccttgagtgaggaagacgctagtgttctcctctatcaatagcaagtttggctgaaatgcaaatatccaataaccagagtgcaggaaggagctcgcccttggaaaagctgtggtcagaatccgtctgtctggctctgcagggcccgatacccagggcttccgctgtcactcagacatggggggcggggcctagcattccatccaatcagaggcattgtggcgggtccctgcccactgttcctccagacactgagggggtcgcattccttacctcacctttgtccctgcgcgggctgcggctgggatccggtctttccagccccgagagggacctggttcctctgcccaggcttctgtcactctgtcacctacgctatgccctgctgtagtcacaggaggtgtagagaggaccccgggacatctgaaagccaggaaatggtgcgtgtctggggccgggtgtcgtgagacgggggaggggctgcctggaccgaccggaaccgactgtggcgagaccctggctttcctgcgggcgactttgggatctgggaccgagtcctcctggagccgctcggccctcggtcccctcgactgctcggtgtggctgggccggtagccgggacaccaggcgtcctgtctcgtctctgcgcggcgactgcggttccagagccctctatgggcagctccgcgcccgcagccacgcgtctacccagattgtgcgggggccacgggagggtcatgtgggtgatcccgactcgggtgtggggttcgtgcttgggaggagcagcggtctgtggggcccccagtgtccactttttctcctgttaaaaattaaactgaggaacgttaacaaagagttcatttgagcaaacagcgattcacgaatgagacacacccagtcctggcttgtggtttgtcaacggaaaaagccaaactatgtaaaataaagaagtttattcggagccgaataggagagaccttggccgagggaaaaacaaccccaagaagcctggagtaagtggtcccgaggcggctcaagacagtttggttttattcattttagagagacaggaattgcagggaaaatcatgaattagtgcctggaaggtgtaatttccttaggcagaaagggagggacctggccgggcacggtggctcacgcttgtaattccagcactttgggaggccaaggcgggcggatcacctgaggtcaggagttcaagaccagcctggccaacatggtgaaaccccgtctctactaaaaatataaaaaagaaactagccgggcgtgatggtggacgcctgtaatcccagctactcgggaggctgagacaagagaattacttgaatccaggagacaggttgcagtgagcccacacagtgccactgcactccagcctcagcacagagtgcgactctgtctcaaaacaaaaacaaaaacaaaaaacagaaagggcgggacctgtggaaggggggttagaaggcacaggtggttgagggattctgtaggtggcagctggttgagagtgtgaagctttgtctaaagtttggaggaggtaggaaggaatgctgaaggaagggggtctgttatctgccacttgattccatcccagccaaaaaacagacctgtttctctagattttatgaattctaaggtgtgacttacccttgtcttgcgtggccttaggtcttgtttgtaatttggtatcttcttgccacaaggagtctgtttttccagtcagataatgtctgtttttacatgaatgtgcgtcagttgctgcatgtaaactcctaaagggagagggtataaggaggcctgtctcacctcccatcctgtcatacagaggcactcaattttcagggttttttgggggttcccttggccaagagccggtcacttcacttacctgggaaggtactttgtttttgtttttatttaaaacagagtctccttctgtcactcaggctggagtgcaatggctcaatctcggctcactgcaacctccaccttccggattcaagcaattctctagcctcagcctcctgagtagctgggattacaggcacgcacctgaagggggcctgcccctccacccctgtgggtgtttcttgtcaggtagagacaagagactgagtaaagaaataagacacagagacgaagtatagggaaagaacagtgggcccaggggaccggcgctcaacatgcgaggacctgcaccggcgctggtctctgagttccctcagtatttattgatcactatttttactatcttggcgaggggagtgtggcaggacaacagggtgatggtggggagaaggtcagcagggaatcatgtgagcaaaggaacctgtatcatgaataagttcaaggaaagatactgtgcctggatgtgcaggtaggccagatttatgtttcactttatgcaaatatctcagtgtagcaaagagtaacagagcagtattgctgccagcatatcttgcctcccacagggcggttttctcctatttcagaatagaatgaatggtcggctttacacagagacattccattccccggaacgagcaggagacagaagccttcctcttatctcaactgcaaagaggcctccctctttcactattcctcctcagcacagaccctttaggggtgtcaggctgggggatggtaaggtctttcctttcccacgaggccggatctcaggctgtctcagtgggggaaaaccttggacaatacccaggctttgttgggcagaggtccctgcggctttccgcagtgcactgtgcccctggttaaccgagaatggagaatggtgatgacttttaccaagcatactgcctacaaacatattgttaacaaggcacatcctgcacagccctaaatccattaaaccttgattcaatacagcacaggtttctgtgagcacagggttggggctaaagttacagattaacagcatctcaaagaagaacaatttttgttagtacataccaaaatggagtttcttatgtcttccttttctatgtagacacagtaacaatctgatctctcttttccccacatgcaccaccacgcctgcctaatttttgtgtttttagtagagatggggtttcaccatgttggccaggctgttctcgaactcctgacctcaagttacctacctgcctcggcctcccaaagtgctgagattccagatgtgagccacctcgccaggccagaagatagatttttatttttagtttataggttgaagcctcagcttttataaggtacatgaggagacaaaccagataaatgcttgattggttgcagagatgcagtcgccttatttggacttgccagcccgaaataattcaaaggttcagatttcagtttgaagagtttattcaagcagaaagatagcaatggcccattcaggaaaaaaaacagactccagagaaatggactcagtactctaaaattagaagttaagttctttcttatattaccaggaaaagaggtcctgatcagaccccaagagagttcttggatctcacacaggaaagaattcaagacgagtcacaaagtgcagtgagaagggagtttgttgaaagctactctgggccagcatgatggcttagatctgttttctaagcacattgggaggccgaggcaggaggatcacttctagtcagcagttcgagaccagcctgggcaacatagggaaaccccatcttttccaaaaataacaaaaattagccgggtgtggtggcttgcacctgtagttccacgtactcgggaggcaagcgttcaagacccagctggccaatgcagtgagagcctgtctgtattaaaaaaaaaaaaaaagaaaagaaagaaaggaagggagggagggaaggaaggaagaaggaaggaaggaagaaaaaggaaggaaggaaggaagagagtgattctctgttacagagtagggcatcctcataaagcaagtggaggaatgtactaagtttttcttaggtagggatcttgtctatgtaaagactaaactaagctgtgcctacctgcatgggggctgacagcatcacaaaatttattactctattgatttaaagaaaactatcctttacattttagcacccaagtgcattaaaacaactataattatcttgaaagcacatattgttatgggtattgggacatcaggacattctgttgttgtgggagtgtaaggatacttgcaggcatcttcaggctgttttcttcatgggaaactttatgatcatgggttgtgactggcaaggagtgtttcttgttagtctcaagatggagctgaacttaaattggtgtttctctggctcccctaggcacctgcttccctaacacttgtatagggaaaaggcaaataaatataataggattgcattttccatagaaggctgatgtatgaggtacaataatttaattttatttttttctttgagcgaatgtcttgttctgtggcccaggctggagcagtggtgcgatcatggcttactgcagccttgacctccctggctcaagcacctcagcctcccaagtagctgagactacagtcgcccaccagcactcctggctgatttttttttttttttttttttttgtatgcaggtggcatcttgatatgttgcctaggctggtctctagctcctggcctcaaacagtcctgcttccttggcctccaaaagtgctgcgatcacagacgttagccagtgcacctggctagcaacttaatttgttatggtttgcttttttcccccagcgcttgttttcttttctttctagctgttttttatttccttttcaatttaaaagagtgaattcaacattccagctgaagacaatgtgatagccatgaagtctttgtgtgagaaagttaagagggaagttagtctactacagagatcagtagtgaagaggggcccagtgggatggctcacacctgtaaccccagcactttgggaggctgaggcaggtggatggcttgatctcaggagttcaagaccagcctgggcaacataagtgagatgccatctcaattgtgaaaaatcatattaaataaataaaaaaaaagtgaagagggaaagggtctttcctgtttcccttcagtcatttacaacattttacaaaacactataggtaagaaagaaggcgaatctgtaatcagggaaaggagagttccagctggctatgtgaaagctgtgtgtcatgtgactcaaccccatgattgcattgcttcaagatagagatccaccagcttaaatatttgaattactttgttgtttttgtttgtttgtttgttttgagacaactctgtggcccaggttggagtgcagtgacatcatctcagttcactgcagcctttgcctcctgggttcaagtaattctcctgcttcagcctcccaagtagctgggattacatgcatgtgccaccgcacatggctaatttttgtatttttagtaaacacggggttttaccacgttagccaggctggtctccaactcctgtcctcaagtggtccgcccaccttggcctcctgaagtggtgggattacaggtataagccagctttcctggcctgacttaggtagaaattttctagttatgtaatcagaggttaattggtggattctgcctgattaagcataaattttgtttccctatagattaataattttgaagagttgtatttaaatttgctttcagggtctttaagtaggaccttcggacactgcatacagttcggtctcattgttttttatttaaaattttccacaatctccagggagactgttttcccctggcattttccaaatatatgggatgccggatctcaaatcctccaccctcataccacagcctgactcttcaagggcttgcagtgaaatctgtgtctgaacatttcacatgagaggaaagcagtgaataaccactagacattttcccgaaaaatcctttctgcctctcctccttttatctttcctagacacagtcaccttatcaggatgtctttgggatgcggttcctttctggaaacattacagggtgatgtgtcttcagtgcaccctcctatcttttcctggttttgggttttagaactgcccggggctgactcaagatgcccacaactgccatgtctcccggagggtctcatgggtattagtgccttaggggagtggggcctcccgagggagcagctgaatgccttgtggtggaggagatgcctggtatactcttcatctacataaccaattcttggggtgctcaacttctctctcccaactccaatttccattaattggagacacatagacagtcagccaattggatgttgctattgaggaaaaagagaaatgattcctgtcctctggattgtctcaaccgtgaagggagaaatatcccaaaagacaaggaacagccactccaacatagtggagcaattgcctgcaaagcaagatatgcatgggggtacacaggggacacaatgcagtgttggtgggaaatagtcattgagcacttctcctttcctctcatgtgaaatgttcagagaatcaccaccagacactcccgtgtgaaaatttgtatgcatctcctcctttcatctatcctaaaaacagagatcttttttttttgagacagagccttgctcagtcgcccaggctggagtgcagtggcacgacctcggctcactgcaagctccgcctcccgggttcatgccattctcctgcctcagcctcctgagtagctgggactacaggagccttttagtagagacaggatttcaccatgttagccaggatgctctctatctcctgacctcgtgatccacccgccttggtctcccaaagtgctgggattacaggcatgagataccccacctggcctaaaaacagagatcttatcagattgtcttttggttgaggctcccctttggaaacttcaaagggtattgtgtcttcagcacactctcctatgttttcttggtcctgggtggtagaatggggtgacctaatattcccacagctgccatgtctcttggagggtctagtgagtatcagcccctgagtcactcctcccaggggacagactgaggtaggagaatggggactcccaagagagcagctgaatgccttacgatggaaggagactcctagtatactctgcatctagatagccaacccctcgagatgctcagcttttctttcccagtcccagttttcgtaagttggagacacatggctggtcagccagttggatggtgctattgagggaaaggagaaatgattcctgtcctctggattgtgtcaactgtgaaggaagacaaaaccccaaaagacaaggaaagcccaccccaacggggtggaccagtagcctgcaaatcagaatatgaaattgaggttcacagcggggcatagtgcggtgttggtggaaagtagtcatgagcgcttcggtgagcaggatgggggtggagagatgtctcatgtgatagggtgacctgtgctgacacatgagtcagacatcactgtgttccagccagtattgcccctctgtgggcttgtcccttgtaaagaatagttcatagattgcagcttgagtatttcaaattaactttacgttgcatttttcactagagccaaatccaagaatgattgcatagatcaggtaagacacagaagaggcaactcaacaaagcccatgacatacagtgcatggctcacaatcccaggagatgagggcagcacagctgcagagcaacacagagtggggagaacatccaggatgcacattcaaccagcaggtggggagcaagacagacagggacctgtgggccaaagcgtttctcagggtccagggaattgaacaaggagacgtcgctcagggagttgtttctggtggatttagagcaagcaggcactagttctgtgaagtcatactgtgattaagaggtggtctgtaccatccatgtggggtgtaagggtcagtggtacaagtcaaattggttatatctagctgtcccacagggaggtggtcaccagaatgcagtcgtgtaagaaatatatgtgagttgaccacatggaggaaatgggaggaggtggagaactagaaactgttaagtttgaataaagtttttttccgttatgagaaagttaaatccataaagaaaatgcatgctaaggtaacatataactataagaactcagtataagaggcaactctagaattaattaaattattgtatgtggagatgatgggtagtaaactgattattctcctgtagataaccatttgtcgctgctttttctgttaagtgttcaccacttgtatcattggctggcaatacctggtttgtcatagtttcacattaccttaaacagatgcccagactgggcatggtggctgacgcctgtaatcccagcactttgggaggctgaggcgggcggaacacccgaggtcaggagtttaagatcagcctgaccaatatggtgaaaccctgtcactactaaaagtacaaaattagtcaagcgtgatggtgcatggctgtaatcccagctacttggaaggctgaaacaggagaatcacgagaacctgggagatggaggttgcagtgagccgagatcacaccattgctctccagccttggcaacaagggcgaaactccattaaaaaaaaaaaaaaaaaaaaaaaaaaagattccctggtttcacaatttgctgttttccattggtctatctttccatctctctgataataccattttctcttaattagtataacgttcaaagctgtggtgtttagtgggtatattgcctgtctatcttagtcatcttgggctgctatatcaaattaccatagactgggtgacttaagggataaacatttatttctggcagttcttgaggttgtgaagtccatgttaagggagctggcagatctagtgtctggtaagggcccgcttcctggttttgcagatggtcatcttcttgtgtttcttcatgtgacagaggagaggaagccggctctcctgtgtcttcttataagagcactaatctcattcagaaaggatcgactcttatgctgtcatctaatcctaattacttttcagagatgtcaacttctaatactatattgggggtaggttattaatgtgtgatttttttggagtgatgcaaatattcatgccgtaacaccccccaaccatattctatagagcatcttggctattcttagtcattgtcttgtatttcggtttttagaagtagttttttcttaattttagtgaaaaaaacaaactgccttgtaaatttcatggactaaaatataactgtagtcatatttcagaaacgttacatcatagtgctatttaatctccttttaaggacacatgacattttttcatttatttcattttatattgatgtttttcagtgtagactttttgcataataatcattttatatccttcctgagacttttttggacttgaagaaaattagttttaatagaaattagtggctgggcatggtggctcatgcctgtaatcccaatatttgggaggctgaggtgggtggatcacctgaggtcaggagttcaagaccagcctgatgaacatggaaaaaccttgtctctactaaaaatacaaaattagccaggcctggtggcacatgcctgtaatcccagctacctgggaggctgaggcaggagaatcacttgaacctgggaggccaaggtggcggtgagccaagatcacgccattgcactccagcctgggcaacaagagtgaaactccatctcaaaaaaataaaaataaaaataaaaataaagagattattccagcatcggcaacatggcaaactttgcctatacaaaaaattacctcgtcactgtgatgtgtgcctgtagtcccagctactcaggaggctgaggtagaaggatctgttgagcctaagagttcgaggctgcagtgagctatgattgcaccgctacactccagcctgggcaacagaatgagaccctgtttgaaaaaaaaaaaaaaagagtcaggtgcggtagctcacgtctctaatcccagcactctgggaggccgaggcgggtggatcacaaggtcaggagatcgagaccatcctggctaacatggtgaatccccgcctctactaaaaatataaaaaattagccgagcgtggtggtgggcgcctgtagtcccagctactcgggaggctgaggcaggagaatggcatgaacccgggaggcggaggttgcagtgagccaagatggcgccactgcactccagcctgggtgagagagtgagactccatctcaaaaaaaaaaaaaaagaaaagaaaagaaaaaagaaaaaaattagtttcaatagagtgtgctcttttaaaaattatatttagcagactgttgctgataattataattcactgatagttatttctgtatagagtgtgcattctagaatcttactaaaaatattacatgtgcacaaaatacataaaagaattgcacaattaatccaaataatgatggagccagtattgggaataagataactgccttacatttttttatactttcacaacctgggtatgcatcctcatcagtatgttttatttttgcatgtttttcatgcaaatgataaccaatatgtgatatttcatattggattttattttaactcagttatgaaccttatatggaatgatagttaattcactttcttatttaatgggttttattatttagaacagtggttatttccccaaaacattgagcagataatccacagagttcccgcagttttcttccaggctcatagttcctcctggctttttttttttttttttttttttgagacagaatctcgctctgttgcccaggctggagggcagtggcatgatctcggctcacagcaacctccgtctcccgggttctagcaattcttctgcctcagcctccggagtagctgggaatacaggcacacaccaccacacccaactaatttttgtatttttagtagagagagggtttcaccatattgaccaggctggtctcgaactcctgacctcataattcacccacctcagccttccaaagtgctgggattacaggcgtgagccaccacgcccagcatagtttccactgttttaaacatcttgactggccaggtgctgagcctcatacctgtaatcctaccatttagggaggccaaagcaggaggatagcttggactcaggagttggaggccagcctaggcaacatagcaagaccctgtttcaaagaaaataattgttttaaaccaaaaaaaccatattgactttgtgtagtgtatcctacaacttatgcaagaacatattacatgtgaacatgatgaaaattgaagaagccaatgttattattacctaaagtccatcttttacattaggcttcactctttgtgttctgtggtttaagacaactacatgtgtcatgtatccaccatcacagtcttatacagaagcgtttcactgccctcaaaatcccctgtgctcctcctaattctatctctcccttccctcttttgccacccctatttatccctggcaacaaatggtgatgttcctgcctccgttttgcattttccagaatatcacatatttggaatgatgctgtaagtggccatttcagacttgcttctttcatgtaaaaatatgcattgaaggtctctcgatacctttgttgcttgacaactcacttattttttatttttctttctttatctaaagatttttgttttgtgagagacagggtctcaaactccccagctcaggtgatcctcctgcctgagcttcccaaatgcctggattccacttgtgagccaccatgtccggccactcattttctttcattactgagtaacattccattgtacagatgttaccatagtttgtttctttattcatctactgaaagactcatcttgagcctggtgtgatgcctcatccctgagttcccagcacacgggagactgaggtgagattgcttaaggccagaagttagagaacagcctggtagatacagtgtgagaacttatctatttttttttttaaagactcaccttgtttgattctagtttttggcagttatgagtaaggctgctaaaaacatttgtgggaggacttttgtgtggacatcagttttcagttcatttgagtcaatatgtaggaatgagactactgaatcagtaagaccatgcttattttcttcagagctccacagactgtcttccaaattggctgtagaattttccattcacatccctagtgaaggagagttcactgtctccagcatttggaagtgtcagtgttttggattttagctactccaccaggtatttgctggtgctttatttttgttttcctttttttttccctttggagacggagtttcgttcttgttgcccagactggagtaccatggtgtgattgagctcactgcagcctctgcctcccgggtttaagcgattctcctgactcagactcccaattaactgggattacaggtgtacgccgccatgcatggctgctgttcgtattattagtagagacagggtttcaccatgttgtccaggctggtctcaaacttttgacctcaggtgatccacccgcctcagcttcccaaagggctggattacaggcatgagccactgcacccggcctgttttcatttgctctttaataacatgtaatgtagggcatcctgtcatatgtttgtttgccataattacattctttagggggaggtatacttggaaagattgggctttttttttttttgagactgagtctggctctgtcacccaggctggagggcagtggcgtgatctcggctcactgcaacctctgtctcctgggttccagcgattctcctgcctcagcctcctgagtaactgggattacaggctcacgccaccaggcccagctaatttttgtatttttactagagacggggtttcaccatgttagtcaggctggtctcaaactcctgacttcggtgatccacccgtctctgcctcccaaagtgctgggattaaggcatgagccaccgtaaccggccttttgcttattttttgattggttggtttttttcttacagaattttaggagttctttataccttttgggtacaaatccttgatcagataggtgtcttgcaaatattttgtccctgtctgctgcctctctttttcttcttttaacaaagtcttttccaaaacatttttgttttgaatgaagtccaatttatcgattttctcattcacagatcatgctttttgtgttgtgtgtgaaaccttattgccaaatccaaggtcgtcttggttttctcagtgttacgttctagaaattgtgagttttgcattttccatttaagtaaatgattcattaggaagtagttttgtaaaaggtgcagttctgtgtctaattcatttctttgcatttgctaattcaggtgtttcaataccatttgttttgtgccaccatgcctaattttttactttattatggagacagggtctccttatgttgcccaggctggtcttgaactgaggggctcaaatgatctgtctgccttggcctctgggtttgcatttttagtacatgtctttatagtagatgtttctatgttcctagtgcctctcttgtcatcttatggaatcttctcttttatatttaatttattgagcatttttaatcatcaggagatattaacttatttatgctggaggttgcacttttttgaattgccgacgtgtgaaaaatcagactttggccatgaccttaagcagtaggatataaacaattcccacatgcttagcgttccaaaaagggaacactaggcataaattggttaaggcttgtcagatgccttttctgcctctattaggacattcttatggtgttttgtttgttttaagagtctcactctgttgccccggctggagtgcagtggcgtgatctcggctcactgcaacctctgcctcccaggttcaaatgattctcccatgtcagcctttcaagtaactgtgactataggcatgtgccaccatgcctggctaatttttgtgtttttttagagatggatttccaccatgttggccagagtggtctcaaactgccgacctcaagtgatccgcccaccttaacctcccaaagtgctgggattacaggcatgagccaccatgcctggctgctaccatgatttgttatcattacttatcttaaaacaaaatgtgaaacttatcagcttaagaaattttacatgtacagttgagatagtttgacagatctacataagttctctaagatgaattctattgtattttgcttttttcaattatcctgaggtttcatgcatgttgtagtataggccaagatgttattttcttttttttttttttttttttgaatcggagtttcactcttgttgcccaggctgaagtgcaatggtgcaatcttggctcaccgcaacctcctgcctcccgggttcaagcaattctcctgcctcagcctcctgagtaactaggtttacaggcatgtgccgccatgcccgggtaattttgtatttttagtagagacggcatttctccatgctggtcaggctgatctcaaactctgtccctcaggtgatctgcccgcctcagtcttccaaagtgctgggattacaggcgtcagccaccatgcccggctaagatgtcattttctaagagtaaataatatcccattttatatatatgcttaccacattttgtttttccatttagccatcagtggatatgtgggtggctgcattgctcattactgccacctcaggaaggtggtatagtggttaaatctgtgcttatgacacctgggtatctcttaagagtttcttgtttgccctcttgagtacatacagtgccaggtattttttaggaatgtcccctttgccctgtcagcatctatctagctacattctgacaggataactgcaaaatgaatgattcctgggcatcataatggaagtttctttctacctaggttattcccctcctctctgcttatatctagcatgcctgatttgggtggtccctgggggagtgtgatttcccaggggctccccctcctgctctttgctacctacatgcttcctctgacaatatcatcaaagattacactttgggaacaggcattttcaaggatacacagcctcaggactgctaatgttaactttttctgcatattaattcataggactctgtcatgacagatgctacagtccaaagacccacagtccaaagagacattagggacagcccaggcaactcacttttctccctgggttcggtaaatacatttcctatcctgctgtggctttagcccttgttcagttctagcatcacaattgctttatgaactagccaggtgtggtggcacatgcctgtggtctcaactactcaggaggctgaggcatgagaattgcatgaacccaggagtaagaggttgtagtgagccacgatggtgccactacactccagcctgggtaacagaacgagacgctgtcttaaaaaaaacaactgctggccaggcctggtggctcacgcctgtaatcccagcactttgggaggctgaggcaggcggatcacctgaggtcagcagcctgaccaacatggagaaaccccgtctccactaaaaatacaacattaaccaggcatggtggcacatgcctgtaatcttagctactcaggctgaggaagaagaagtggtagaaccccggcagtgagccgagatcacgccattgcactccagcctgggcaataagagtgaaaatctgtctcaaaaaaaagaattgctttatggaagaaagtaagtatacacagggagaaagagatctgatgacccttggagtccacggcatcctgagaacttcttgagaatagagtctaggcccccagtgctgtcactctcacccatcctcctctacacatgtgagatgtttcaggacccagtggcctttgatgatgttgctgtgaacttcacccaggaggagtgggctttgctggatatttcccagaggaaactctacaaggaagtgatgctggaaactttcaggaacctgacctctgtaggtaaggatgacatattccttccctcagtccattagtgaaccagtgtttctagctcatcaatgctgttgagtgatttagaacatagacaggaaatactttgatgaataaatgaggtatggctgcagtaaatcatgggcatagaatctaataattttttcacaattttatactgcctcaggactatttttctgtgtctatattttaggaaaaagttggaaagaccagaacattgaatatgagtaccaaaaccccaggagaaacttcaggtaatttgtacttacaagacaaagcagtgtctctctagacaatcttagaatatgacaatatattaaaaataagtaaaagaactaagtccaggatcaaatacatttatttttagaatatttgatcaaaaaacatatatataaatgtgacctaggctgtgggctcactcctgtaatcccaatcctttgagaagtggagataggaggatagcttgaggccagcagttcaagaacagcctgggcaacataacgagaccacatatcaacaacagcaaaaaattagctgggcattgtggtctgtagtcccagctactcaggaggctgaggcaggaggatcacttgagccagtaaaggctgcagtaagctatgatgatatcactgcactccagtgtgggcaacaggacgagacccctaaataaaagaaaaatgacacagagtatttagtatttgtaaaatagtttacatgggaagagtattaagaagccccatataaacagttttttaaataatagttatggctgggtcaccttgtacaatgggttgtccagtcaccttcaaacaattcagacagggcagaaagcctacactttgatggacagtgttaaaaatgcaagttcagtacttgttgattaatataaaattacttataaacaaaccctttgtaatgtgcttctcatttttgacaggagtctcatagaaaagaaagtcaatgaaattaaagatgacagtcattgtggagaaacttttacccaggttccagatgacaggctgaacttccaggagaagaaagcttctcctgaaataaaatcatgtgacagctttgtgtgtggagaagttggcctaggtaactcatcttttaatatgaacatcagaggtgacattggacacaaggcctatgagtatcaggaatatggaccgaagccatgtaagtgtcaacaacctaaaaaagccttcagatatcacccctcctttagaacaccacaaagggatcacactggagagaaaccctatgcttgtaaagaatgtggaaaaacttttatttcccattcaagcattcaaagacacgtggtaatgcacagtggggatggaccttataaatgtaaattttgtgggaaagccttccattgtctcagtttatatcttatccatgaaagaattcacactggagagaaaccatatgaatgtaaacaatgtggtaaatcctttagttattctgctacccttcgaatacacgaaagaactcacactggagaaaagccttatgaatgtcagcaatgtgggaaagcatttcatagtcccagatgctatcgtagacatgaaaggattcacacgggagagaaggcttatcaatgtaaggaatgtggaaaagcattcacgtgtccccagtatgttcgtatacatgaaaggacccactctaggaaaaaaccctatgaatgtacgcagtgtgggaaagcattatcctctcttacaagttttcaaacacacataagaatgcactctggagaaagaccttatgaatgtaagatatgtgggaaaggcttttgttctgccaattcatttcaaagacatgaaaaaactcacagtggagagaaaccctataaatgcaagcaatgtggtaaagccttcattcattccagttcccttcgttatcatgaaaggattcacactggagagaaaccctatgagtgtaagcaatgtgggaaggccttcagatcttcctcacaccttcaattgcatggtaggactcacactggagagaagccctatgaatgtcaggaatgtgggaaagccttcagatctatgaagaaccttcaaagtcatgaaaggacacaaacacacgtaagaatacactctggagaaagaccttataaatgtaagctatgtgggaaaggcttttattgtcccaaatcattgcaaagacatgaaaaaactcacactggagagaaactctatgaatgcaagcaatgtggtgaagccttcagtagttccagttcctttcgataccatgaaaggactcacactggagagaaaccctataaatgcaagcaatgtgggaaagccttcagagctgcctcagtccttcgaatgcatggtaggactcaccctgaagataaaccctatgagtgtaagcaatgagggaaagccttcagatctgcctcacacctttgaatgcatggtaggacacacaatcaagagaaaccatgaatgtaaagaatgtgggaaacccttcaggtctgcccagaaccttcgaattcagtaaaggacacaagcacacataagaatgcattctggatagctgaacaaaaggcagcagaaacttctgcagacttaaatgtccctgtctgacagctttgaagagagtagcagtcctcccagcatggagtttgagatctaagaatggacagtctgcctcctcaagtgggtccctgatctccaagtagcctaactgggaggcacttcccagtaggggccaactgacacctcatacggccgtgtgcccctctgtgacgaagcttccagaggaaggatcaggcaacaacatttgccgttctgcaatatttgctgttctgcagcccctgctggtgatacccaggcaaacagggtctggagtggacctcaagcaaaatccaacagacctcagctgagggtcctgactgttagaaggaaaactaacaaacagaaaggacaaccacaccaaaacccatctgtacatcaccatcatcaaagaccaaaagtagataaaaccacaaagatggggagaaaccagagcagaaaagctgaaaattctaaacatcagagcgcctcttctcctccaaaggaacgcagctcctcgccagcaatggaacaaagctggactttgactttgacgagctgagagaagaaggcttcagatgatcggtaataacaaacttctccaagctaaaggaggatgttcgaacccatcacaaagaagctaaaaaccttgaaaaaagattagacaaaatggctaactagaataaacagtgtagagaagaccttaaatgacccgatggagctgaaaaccatggcacgagaactatgtgatgcatgcacaagcttcagtagctgattcaatcaagtggaagaaaaggtatcagtaattgaagatcaaatggatgaaatgaagtgagaagagaagtttagagaaaaaagagtaaaaagaaatgaaaaagcctccaagaaatatgggactatgtgaaaagaccaaatctatgtctgattggtgtacctgaaagtgacagggatggaaccaagttgggaaacactcttcaggatattattcaggagaacttccccaacctagcaaggcagaccaacattcaaattcaggaaatacagagaacgccacaaagatactcctcgagaggagcaactccaagacacataattgtcagattcaccaaagttgaaatgaaggaaaaaatgttaagggcagccagagagaaaggtcgggttacccacaaagggaagcccgtcagactaacagcggatctcttggcagaaactctacaagccagaaaagagtgggggccaatattcaacattcttaaaggaaagaattttcaacccagaatttcatatccagccatactaagcttcataagtgaaggagaaataaaatcctttacagattcaaatgctgagagattttgtcaccaccaggcctgctgtaaaagatctcctgaaggaagcactaaacatggaaaggaacaaccggtaccagccactgcaaaaacatgccaaattgtaaagaccattgaggctaggaagaaactgtatcaactaacgagcaaaataaccagttaacatcataatgactggatcaaattcacacataacaatattaaccttcaatgtaaatgggctaaatgctccaattaaaagacacagactggcaaattggataaagaatcaagacccatcagtgtgctgtattcaggagacccatctcacgtgcagagacatacataggctcaaaataaagggatggaggaagatctaccaagcaaatggaaaacaaacaaaaaaagcaggggttgcaatcctagtctctgataaaacagactttaaaccaacaaagatcaaaagagacaaggccattacataaaggtaaagggatcaattcaacaagaagagctaactatcctaaatatttatgcacccaatacaggagcactgagatgcataaagcaagtccttagagacctacaaagagacttagactcccacacaataataatgggagactttaacatcccactgtcaacattagacagatcaatgagacagaaagttaacaaggatatacaggaattgaactcagctctgcaccaagaggacctaatagacatctacagaactctccaccccaaatcaacagaatatacattcttctcagcaccacatcacacttattccaaaattgaccacatagttggaagtaaagcactcctcagcaaatgtagaagaatagaaattataacaaactgtctctcggaccacagagcaatcaaactagaactcaggattaagaaactcactctaaaccactcaaatacatggaaactgaacaacctgctcctgaatgactactgggtacataacaaatgaaggcagaaataaagatgttctttgaaaccaatgagaacaaagacacaacataccagaatctctgggacacatttaaagcagtttgtagagggaaatttatagcactaaatgcccacaggagaaagcaggaaagatgtaaaattgacaccctaacatcacaattaaaagaactagagaggcaagagcaaacacattcaaaagctagcagaaggcaagaaataactaagatcagagcagaactgaaggagacagagacagaaaaaacccttcaaaaaatcagtgaatccaggagctgtttttttgaaaagatcaacaaaattgatagaccgccagcaagactaataaagaagaaaagagagaagaatcaaatagatgcaataaaaaatgataaaggggatatcaccaccgatcccacagaaatacaaactaccatcagagagtactataaatacctctatggaaataaactagaaaatctagaagaaatggataaattcctggacacatacaccctcccaagactaaaccaggaagaagtcgaatccctgaatagaccaataacaggctctgaaattgaggcaataattaatagactaccaaccaaaaaaagtcaaggaccagatggattcacagctgaattctaccagaggtacaaagaggagctagtaccattccttcttaaactattccaatcaatagaaaaagagggaatcctccctaactcattttatgaggccagcaacatcctgataccaaagcctggcagagacacaacaaaaagaattttagaccaatatacctgatgaacatcgatgcaaaaatcctcaataaaatactggcaaaccaaatccagcagcacatcaaaaagcttatccaccacgatcaagttggcttcatccctgggatgcaaggctgattcaacatatgcaaagcaataaacgtaatccatcatataaacagaaccaaagacaaaaaccacaagattatctgaatagatgcagaaaaggccttcgacaaaattccacagccctttatgctaaaaactctcaataaactgggtattgatgggatgtatctcaaaataataagagctatttatgacaaacctacagtcaatatcatatactgaatgggcaaaaactggaagcattccctttgaaaactggcacaagacagggatgccctctctcaccactcctattcaacatagtgttggaagttctggccagggcaatcaggaaggacaaagaactaaagggtattcaagtaggaaaagaggaagtcaaattgtccctgtttgcagatgacatgattgtatatttagaaaaccctatcatctcagcccaaaatctccttaagctgataagcaacttcagcaaagtctcaggatacaaaatcaatgtgcaaaaatcacaagcattcctatacaccaacaacagacaaacagagagccaaatcatgagtgaactcccattcacaattgcttcaaagagaataaaatacctaggaatccaacttacaagggatgtgaaggacctcttcaaagagaactacaaaccactgctcaacgaaatcaaagaggacacaaacaaatggaagaacattccatgctcgtggataggaagaatcaatatcatgaaaatggccatactgcccaaggtaatttgtagattccatgccatccccatcaagctaccgatgactttcttcacagaattggaaaaaactactttaaagttcatatggaaccaaagaagagcccacattgccaagacaatcctaagccaaaagaacaaagctcaaggcattaggctacctgacttcaaactatactacaaggctacagtaaccaaaacagcatggtactggtaccaaacagagatatagaccaatggaacagaatagagccctcagaaataataccacacatctacaaccatctgatctttgacaaacctgataaaaacaagaaatggggaaaggattccctatttaataaatggtgctgggaaaactggctagccgtatgtagaaagctgaaactggatcccttccttacaccttatacaaaaattaaattccagatggattaaagacttaaatgttagacctaaaaccataaaaaccctagaagaaaacctaggcagtaacattcaggacataggcatgggcaaggacttcatgattaaaacaccaaaagcaatggcaacaaatgccaaaattgacaaatgggatctaattaaactaaggagcttctgcacagcaaaagaaactaccatcagagtgaacaggcaacctacagaatgggagaaaatttttacaatctacccatctgacaaagggctaatatccagaatctacaaagaacttaaacaaatttacaagaaaaaatcaaacaaccccgtcaaaaagtgggcaaaggatatgaacagacatttctcaaaagaagacatttatgcagccaacagacacatgaaaaaatgctcaccatcactggccatcagagaaatgcaaatcaaaaccacaatgaaataccatctcacaccagttagaatggcaatcattaaaaagtcaggaaacaacaggtgctagagaggatgtggagaaataggaacacttttacactgttggtgggactgtaaactagttcaaccattgtggaagacagtgtggtgattcctcaagaatctagacctagaaataccatttgacccagccatcccattactgggtatatacccaaaggattataaatcatgctgctataaagacacatgcacacgtatgtttattgtggcactattcacaatagcaaagacttggaaccaaaccaaatgtccatcaatgataggctagattaagaaaacgtggcacatatacaccatggaatactatgcagccataaaaaatgatgagttcatgtcctttgtagggacatggatgaagctggaaaccatcattctgagcaaactataacaaggacagaaaaccaacactgcatattctcactcataggagagaactgaacaatgagaacacttggacacagggagggaaacatcacacaccagggcctgtcatggggtagggggaggggagagatagcactgggagatatacctaatatgaatgacaagttaatgggtacagcacaccaacatggcacgtgtatacatatgtaacaaacctgcacattgtgcacatgtaccctagaacttaaagtataataataataataataaaagaatgcactctgtagaaagaccttataaatgtaagatatgtgggaaaggcttttattctgccaagtcatttcaaatacatgaaaaatcttacactggagagaaaccctatgagtgtaagcaatgtggtaaagcctttgtttctttcacttcctttccatatcatgaaaggactcacactggagagaaaccctatgagtgtaagcaatgtggaaaagccttcagatctacctcacacctttgaaaacatggtaggactcacactggagagaaaccctatgaatgtaagcaatgtgggaaagccttcagatctgtcaaaaattgttgaattcatgaaaggacacacactggagagaaaccctgtgaatgtaagaaatgtgggaaagcgttccataatttctcttctttgcaaatacatgaaaggatgcacagaggagagaagctctgtgaatgtaagcattgtgggaaagcattcatacctgccaagatcctttgaatacatgcaagaacacacaatggagagaaaccctatgaatgtaaagaatgcagaaaagcattcagcttgcctacttcctttcatagacatgaaaagacattggaaggaaaccctatgaaggcaagcaatgtggcaaagctttcacttcttccagttcttttcaatatcatgaaagaattcacactggggagaaaccctatcagtgtaagcaatgtgcgaaagcctttatttcttccacttcttttcaatatcatgaaaggactcacatgggagagaaaccctatgagtgtatgccatgtgggaaagccttcatttttctagttgctttcgatgtcatgaaaggactcacactggagagaagccctatgaatgtaagcaatgcaggaaagccttcagatcagcctcacaccttcaaatgtatggaaggactcacactggagagaaaccctatgaatgtaagcagtatgggaaagcattcagacctgacaagattctttgaatacagataatgaatgtaaacaattaactgtttgtaataactgtatactaacaaatgttatctttaaataattaagaagctataatagtaaggccgggtgcggtggcttatgcccgtaatcccaccagtttgggaggccaaggcagatcacgaggccaggagatcgagaccatcctggttaacatggtgaaaccctgtctctactaaaaatacaaaaaattagccaggcgtggtggtgggtgcctgcagtcccagctactcggcaggctgaggcaggagaatggcatgaatccaggaggcagagcttgcagtgagccaagattgcgccactgcactccagtctgggcgacagagtgaggctccgtttcaaaaaaaaaagctataataaaatatcccattggtgtcatgtattagatcaaccttatactgttaaattgttattatttggacattgtgagtcagtataaccatgtggataaaatgccaggcatcttttttttttcggaaattttacttttcatgcttatgtacttacatttttatctcaaccctaatttttcttatctttttttttttccagaaaaaaatctcactctgtcacccaggctggagtgcagtggcatgatctcaggtcgctgcaacctctgcctccagggttcaagcaactctcctgcttcagcctcctgagtagctgggactacaggcatgcaccaccacgccaggctaattttttgtattttttagtagagacagggtttcaccatattggccaggctggtcttgaactccagacctcatgattcgcctgcctcggcctcccaaaatgctgggattacagatatgagccatcatgcccagccgcaaccctaatttttcattcagtcataataccaacagttatctcatgtacctctgagtgccttcttcccaaaagccagcagtaccatacctgctgtcagcaagtgtgtaatataccatagtgataaatatgaccaaaagccataaatgactgtgagatgtatgagaatgacacgtcacattagtaagaagagaaaaattttggccatgtttatgatttgaaatatgttttcctctatcacatttagaaatatagttacaaaatgcccttagttttatcctgattcatcatggtcactgaggagcatcgtctcatatgcctggtatgtgacatgtgtctcttcaacagtaaaagacttggcattggctgggcatggtggctcacgcctgtaatcccagcactttgggaggccgaggtcaggagttagagaccattctgaccaatatgatcaaaccccgtctctactaaaaatacaaaaattagcggggtgtggtggcatgctcctgtaatcctagctattcaggaggctgacgcaggagacttgcttgaatataggaggcagacgttgcagtgagccgaggtcacaccattcactccagcctgggcaacaagagcgaaactccgtttcaaaaaaaaaaaaaatgacttggacttgtggtgaggggaggtcatctgtagactcctggacctgtttttgccttacttattctctaaagactgaaatatttcctaaaatgtatgggcactgtttaccagaaagtaccttagttaaaacataaaatcatttatgccttataaagctatattttttcaattgctttactgagtcataggaggctaataaatttgtgtaaattgtctaaatacaagcctgtctttctctgataatgtgctgctgaggctaacttgtcaacagcctgcttatctcagcagtgtaaagttaacagcaacatggaaaagtttcttttatatattatgcaacggcttagaacaattcagtcacttcctttaaggtaccaatgaagctgctcttcagaaacgcttatttaaaactccctaagatcaaaatccaggcaccacaagatgcagcatcagccactgaccaaaccctgtctgtgtgtggaggtgacacacccagtcccagataatgtatccacatcagtgaagggtggagtcgttgattgtcagatcacacaaagtgactcagagcagggaagacagggcagtgaaacctggccaggcacagtggctcatacctgtaatcccaccactttgctagtccaaagcgggtggatcacttgaggtcaggaattcaagacaagcctgaccaacatggtgaaaccctgtctctactaaaaatacaaaaactagctgggcatcgtggtgtgtgcctgtaatcccagctaatcaggatgctgaggcaggagaatggcttgagcctggagacagaggttacagtgaactgagatcacaccattgcaccctgcagcctagtcgacacagcgagactctgtctccagaagaaaaaaagaaagagttggatgcacctgaattcaacccctgcctcatccttctcccttgaaggccaaatacaccctgatacttttcaccaaagagtagaaacaacaccattcacttgaccccaaatgtgactttccacaggatgcaagcacagtgttggaatggccaatgacaatgacaatgaaagtgcaggctgagggtgatgaacaggacacactggagagcctgacattggcctagactatgggggtgtcttgatgcttcacaaagagcccaaggagcaccccaaagaggacactggagcacaggcccaaagggtgttcatatgccaggaaggccactaattttggaagtcagtgacattggtgcctgcttgagtcctgatcctacaaagagtgaccattgaaagctcacaccaggtggggtggctcacgcctgtaatcccagcactttgggaggccgaggtgggtggatcatctgaggttgggagtttgagaccaaccaggccagcatggcaaaactccatctctactaaaaatacaaaaagtagctgggtgtagtggctcacgcctgtaatcccagccagttgggaggctgaggcacgagagtagcttaaactcacaaggcggaggttgcagtgtgctgagatcgcgccattgcacttcagcctgggtgacagagcgagactctgtctccaaaaaagaaaaaaaaagctcacttggttcttcccctgatgcccccactgcaggtgtaccaggtgtaccagctactcacattgaccattggaggagccctttatactgagagaacctcagagccccggaaagctagggatccacaggcagatgcagtactcagtgatgccctctgcaagtgatagtttttgtcttggggctttttccagacattctagtgaaacaaatgtgggtttaggtaagaaataacttttaattctagaccttgaagccagcttgtcattaaaacagttcataacaaaaaagtctaggtactgaacttgtaagtaaaaatagaaatattaaataaatatcttaaaagatattaaataaatacataaaatgtgcttgtatataggcttagaaggggtcagtcaaaaattcaggggccgctgggcagattggctcatgcctgtaatcccagcactttgggaggctgaggcaggcagatcacttgaggtcaggagttcaagaccaccctggccagcatggtgaaacaccatctctatgaaaaatataaaaattagctgggtgtggtggcacacacctgtaacaccagctactctggtgactgaggcatgagaatcacttgaaccagggaggcggaggttgcagtgagccaagatcatgctactgcactccagcctgggctacagaacaagactgtctcaaaaaaagaaaaaagttcagggacctggaggaaggagagaaactgaagcatgctttggtagatagatatttcattttgactaaagatcactaaagagaaaactgttcacctaatggtttgtgaggtaaatactggaatatctagtgggtgtctggtttgtcataggtaacaaacgtagcaccatctaagtcatcatgggaagcttgtttcattgtagtaaggtgctcttgcacaacacaaaggatgggggatttcatgaatcacagccattttcaggattgcccacccacccccatctcctttccacaccccttactctttttctatccatgtctttgatttgactcgtcctgagttgtatccttcatagtaagtgggtaaatgtaagtgaactgtgggtagttctatcaaattatggaacttgagtaaggtgttgtacaggacccaggtctagatgcagttgctgagaagtacaggtggcccctggggctttgacttgcatctgccaagtggggctgtgttgggtgagccaggaactcatggagtctctgctaactctgggtggcttctgaattgcatggttacataactgcttagtgctggagaattgattggtgttcagcaagcaccacacatttgatgtcaggcaaaaagacagcataggtcagaaccttccactgactcacagtgagcgagtggtctttggtgggcattgagaccctggtggaaggactgtgtccacactgtggggaggggccagcagggtgtgtgtggaattcccagaagtaattttctgactgctcacatttccttcacacactacctaggagtgggccagcctggcctgtgtctccacggtccaagtggttcctaagcttgaaaatgtgtaactattggagtgtgggtttccttgtgagctgtgggtgaggcaggctgcctacctgagctgcctcccttttgtttttttacagaatcttgctgccatggaattgctctttccccacgcatctgagaatttatttatttgtttgtttgtctatttttcagatagaatctcactctgtggccaaggctggatcagtggcgtgatctcggctcactgcaacttgcctcccagattctcctggctcagcctcctgggtagccgggactgctggcacaagccaccacaccctgcttttttttttttttttttgagacagtcttgctctgtcacccaggctggagtgcagtggcaggatctcggctcactgcaacctttgtctcctgggctcaagcaactgtcctacctcagcctcctgagtagctgggattataggcacctgcaaccacactcagctaatttttgcatttttagtagagacggtttcaccatgttgtccaggctggtctcgaactcctgacctcaggtgatccacccgcctcggcctcccaaagtgctgagattacaggcatgagccaccatgcccagcctatctcttgatcttattgacaatgcttttcttgtttttattcctaactggaaatacaacacaaagttttacacattgggaaataattgctgggttgtagattatgggtaaattcaaatttactaggaaatgtcagtacagtatgaatgtaacttatgaattaaccatctcacctttcatgcacgtgcctttattcttgtgatttgccaacactttgaattatctaactcacttttcgtcgcccatttactcttaaacagaatctctgtgtgattatttattgctttttatttgttgccattggttgagcatttttcttatataatctttcatcttctgtgtagcagtatccagtcatcctcttacatttgactaatttgtagttatctctctttttctcctcgttttcttttattttaatttgagacatccttgctctgtagcccagctggagtgcagtgttctggtcactcactgcagcatcaagctcctgggcttgagcaatcctcccacctcggctttctgcccagctaattttcaaaaattttttgtagagacaagggtgtcacggttttgcccaggctggtctcgaactcccgggctcaatcaatcctcttgcctcggcctcccaaagtgctaggattgcagacatgatccaccatgctcagcaattagggttttttttttaaaaccaagatatctgtacatgtttctgacaaatattttatttaaaatctttaacaactgcatactaaccaaggttattctgtttttcattttctgttttccattttcattatgattacttgtttttcttttttttttttttgagacggagtctcgctgtgtcgcccaggctggagtgcagtggtgcgatctccgctcactgcaacctccgcctcccgggttcacgccattctcctgcctcagcctcctgagtagctgggactacaggcgcccgccaccacgcccggctaattttttgtatttttagtagagacggggtttcatcgtgttagccaggatggtctcaatctcctgccctcgtgatccgcctaccttggcctcccaaagtgctgggattacaggcgtgagccaccgcgcctggccccttgtttttcttttttattctcattttttcctagataattacaatacttttccatgtagtggctctggcagcattttcatccttcatgcaatcatacagctacctcgatgtcccttctctctgccattctgaaattagacctcactcctttgtgactcttgctccccatctgctatgtgataaagtcctgtctgattacatcgtctccaaagcctctttttgggcttctgtttaccccttggcgtgtcttgtatttactctcctcaaaatatatacttggaggccaggtgtggtggctcactcctgtaatcccagtatttgggaggccgaggcatgaggatcccttgagcccaggagtttaaaaccagcctgggccacacagggagaccctgtctcaaaaacaaaacttatacttgcaagccctaaaccccaacatggtcatatttggacacgaaccctttaggagatcacatacatttataaaggagggctctcacaatgggatgagtaagaagagagagagaactctgtctctccagcatgtgaggacacagcaagaagtcatctagctgcaagccaggaagacactcttcactaggaacaaaattgctggcagcaagatgttggactcccgaagctccagaactgtgagaaaaaaattctgctgtttaagaaactgagtccatggtattttgttataccagcctcagctaagtcatcccaagagtcctcacataaatcatatactatcgtatatgatatcgtgctgcatttggatctacctggaatgtctccaaatcttctacttttcctcttggacccattgtgagaataggtgtgcttcataggcaactactggtgatagtagtgatagcccataacgacttgggacaaaaaaggaacttttacttttttttttttttttttcttcctgagatggagtttgtgctctgttgtccaggctggagtgcaatggcgtgatctcagctcactgcaacttctgcctcctgggttcaagcgattctactgcctctgcctccagaatagccaggatcacaggtgtgcactaccatgtccggataatttttgtattggtagttagagacaaggtttcaccatgttggccaggctggtcttgaactcttgatatcaggtgatccactcactttggcctcccaaagttcttggattacaggcgtgagctactatgctcgccctgttttatgtatataaatatgtgtgtgtgtatttctctttttaataaaatagagactagttctcactatgttgcccaaggtggtcataggccaaacttttgggctcaagcaatctacctgcctcgaccactcaacgtgctgggattaaggcatgggaaactgtgccaggccaaatgaaagagacttagtgggaggctgggcgcggtggttcacacctgtaatcccagcactttgggaggctgaggggggtgcatcacctgagctcaggagttcaagaccagcctggacaacgtggtgaaaccgcatctctaccaaaaatacaaaaaattagccgggcatggtagtcccattctcacagtcacagaaaggttctttcttaaggattccacctgctggaaagcattatatactaccagaacttgttcaattcaagagtgtctggtctcatctccatgtcataattacaaccaaaatcctaaagggactgatttaccacactgtgggtgccataaggcccaatttttaccctcagcagcagctgtaacatcccaagttacagctctaccctccaaagatgtgcctgaggcttgtgcctgccatactaacatgttaatatgtccaaagcttcctgcagagctgtgtcccagtcccaaagtgcccctttctaataagtctatatattggtctcaaacattggactcagtgtcagataaatgctctccaataatccaaagactaacaaatgtctggatttcttttctccttttttttttctttaagaaacatagtatggctctgtttcccaggctagagtgcagtggtgggatcatagctcactgcagaaactcctaggcccaagggattctcctgcctcagcctcccaagtagctgggaataaaggcacatgccactatgcccggctgtttttaaattttttgtgcagatggagtctcactatattgcccaggctgttcttgaactccaaggctcaagtgatccccctacctcagcctcccaaagtgctgagattacagtcatgaaccaatgctcccagccctgaaatggaaaatttcttttgtttgtttgtttgtttgtttgtttgttttttgagacagagtctcactctgtcatccaggctggagtgcagtggcataatctcggctcactgcaaccttccaactcccgggttcaagcgattctctgcctcagcctcctgagtagctgggattacaggcacctgccactacgcccagctaatttttgtatttttagtagagacagggtttcaccatcttggccaggctagtcttgaactcctgacctcaggtgatccacctgcctcgacctcccaaagtgctgggattacaggcatgagccactgcgcccggccctgaaatggaaatatttcaaagggaaaacatctaacgttcaagttattatctatagagcagttaacaggaactatcatttagggtccatcgtgaggcagaaatttaaaaataataagtactgaatttatttactccaagaaaagtaaaagctaaggcccagagtgtggcaaggcaagggttaaaaagaaaaaagaaaagcacaagttttcctctgcctagcagctcacttccaggaccttatcaagaagataacgatgtccaaatagccaaggccaaaggaatgggctccagacacccctcccttccagagcaatgttgaaggaaaaaaaaaaaagagacagattcttttactgttactcttttgcaagtcttcttaagcattattatgttttacaaatgtctgtatttagccagttcttgtttttctttcaatgcagctacaaggacactggctatgcaaggtcataaattatgttatgctatagattacatgacctgtcactgtatgattaactgcttttgtttggcatctgtaagacagcgtataaaaaccccactttgtcttcgttcagtcctcagctttttggatatgaatcgtctgagccagtgcgtacctaaaatataaacaaatcctcctgtactccatattggtctctccttcctcagtttaccacaacaatgggattctaggacactaggtatgaagcaaatatgaggaagttcagggaacaagctgacttaatgattaatgctgaaggttctgcagcttggtttaagttttctcctcccatcctccctgatgaatttgataaagtttaaagggatggtttcaccaggggccttttccattgactgcaaggaggtcatccgcctggtaaatcctcagtaggccaagcctcttatgtggccagaatgatccagtccataaggaaataccacctgctgtgttttacaattagaccatccaagggggtcagggtttccccggggagtctggtgggctttttatgggtttttttgtttttgattttttttttttttgagacagtgtcttgctgaagttcagtaacctgatcacagctcacagcagcctcaaactttggggctcaagtgatcctcctgcctcagcctcctgagtagctgtgattacaggtacacaccacctctcctggctaattaaaaaatagatttatggagatgggagtgtctcacttcactgctcagggtggtcttcaacttcgggcttcaagtgatcctgccactttggcctcccaaaatgttgggattgcaggcatgagccatggcacctggcctcccaggctgttgttgaaaggtctttgcaatctctaagagttctgcagcagtttattccctgacagcgagagtctcatcctttgatcccattttgcagcagtagttgggtgttcacttttctttccataaggaagcaagcttgccagtgaccctcatccccctcctcatcgatgacttctttgtcatcagagccttcctcttcataaattcccacggaatccaagttttcacgtcccgattgggcttagttatgatagctactggctcacacaagctgcaacagcaccccgtcccatggaagccacccgactctctcctccctgagtttcctgtcctgggagcccccatctctgctctcccgggctccgggccctagagccgcactgctgcagagcccagttcccagggcagctccctccacctatccacatccatctccagctctccaccctctctcccaccagcctggcctggaggtgctgcagtgtcattgactgcgagtccctcagctgccacctccaccgcgatctggaagtctttcaaatgcccttaagttatcttagatttttcctcccccactttatacataagcataggaggagagcagggactctgctggtgtcttatttacacaatgggattgaaggtgtttgtctcgcgaaactaatcgatggggtgagaagtagctgaataacctgcagggggcagcagagcccaaggccagtgattccacgttgaggacagtctctgcagcctgcaaagggagggaaagagagtttccctgggggcttcgcgggcagcccacccccttctacaagtggcctccagctgctcagagcagctccagaaagggtgtggattccgagaagctgcagagccctggaaagcagaagacccatgtgcagacgcatttgtggcgtctctgtcctttctggtgttgtacctctggagctgtcttctgggcagggtttggggtttgacatgcatggggtcgttggggtcagagttatttgtatagataaagaaaatgtgtggccgggcgcggtggctcacgcctgtaatcccagcactttgcggggccgaggcgggcggatcaagaggtcagaagatcgagaccatcctggctaacacggtgaaaccccgtctccactgaaaatacaaaatattagccgggcgtggtggcgggcgcctttaatcccagctactccggaggccgaggtaagagaatggcgtgaactcgggaggcggagcttgcagtgagtcgagatcgcaccactgcactccagcctgggctacagagcaagactccgtctcaaaaaaaaaaaaaaaaaaagaaagaaagaaaagaaaatgtgtgaagatcaggctagagctagagacagaattgtttggtggcgtcacctggataaagggttcatgaagttgacagtttacttaggtcagaaacaaaacctggtgagagtttcctgctggtgaaaatgaagatctgaaaggaggaagcattttcacaaggggatgggggtgtgtgagcaaggcttggccacgcctcatccccaattccggcccgctcgaggacatatgcctctcctcctggtgcagtcgtgcctggcctggtctcggttcccctgctgctctgaggccagcagttggctcctatggacactgagtctgaaattccctgcacactcctgtgaccccgtgcagaacgaaggagcggggactgtcccttgagtgaggatgacgctagtgttctcttctatcaatagcaagtttggctgaaatgcaaatatccaataaccagagtgcagaaagcagctcgcccttagagaagctgtggctagaatccgtcagtctggctctgcggggcctgatacccagggcttcagctgtcactcagatgtggggggcgggacctagtatttcatccaatcagaggtgctggggcgtggcactgcccacagttcatccggaaatggagggggtcgctttcctcaccttcctcgctgcgcgggcggcggttggtaaccggtcagaccagcccgagagggacctggtgcctgtacccaggcttctgtcgctctgtcgcctgcgctatgccctgctgtagtcacaggagctgtagagaggaccccggtacatctgaaagccgggaaatggtgcgtgtgcgggaccagatgtcgtgagacgggggaggggctgcctggaacaggcgggaaccggctgtggcgggacccgggcctccctgtgggcgactccggggtctgggaccgagtcctccttgagcagttcggccctcggtccccttggccgctggacggggctgggccagcagccaggacccgggcgtcctgtcccgtccctgcgcggcgactgcggccgcggcccctgccccggagccctctctgggcagttccgctcccgcagccccgcgtctccccagattgtgcggaagcaacgggagggtcatggaggcatcctgactcgggtgtggggttcgtgcgtgggaggagcagtggtctgtggggcccccagtccccactttctcctgttaaaaattaaactgaggtacgttaacaattaaagagttcatttgagcaaacagcgattcacgaatgagaaacaccccgtcctgggttgtggtttgtcaacggaaaaagccaaactatgtaaaataaagaagtttattcagagccgaataggagagaccttggccgagggaaacacaaccccaagcagcctggagtaagtggtcccgaggcggctcaagacagtttggttttattcatttcagagagacaggaattgcagggaaaatgatgaatcagtgcctgaaaggtgtaagttccattggcagaaagggtgggacctgtggaaggggggttagaaggcacaggtggttgagggattctgtaggtggcagctggttgagagtgtgaagtttgtctaaagtttggaggaggtaggaaggaagggggtctgttatctgccacttgattccatcccagccagaaaacagacctgtttctctagattttatgaattctgaggcgtgactttacttttgccttgcgtggccttaggttttgtttgtaagttagtatcttcttgccacaagcagtctgtttttccattctatctatttttacatgaatgtgtgggagagggtataaggagacctgtctcacctcccatcctgtcatacagaggcactcaattttcagggttttttgcgggtcctgttggccaagagccggtcacttcacttagctggaaaggtactttgtttttatttgagacggagtctcctgtcgcccagactggagtgcaatggcctgatctcggctcactgcaacctccaccttccgggttcaagtgattctcctgcctcagcctcctgagtagctgggattgcaggcatgcaccactatgccctcctaatttttgtatttttagtagagatggggtttcaccatgttggccaggctggtctcgaactcctgacctcaagtgatccacccacctcagcctcccaaagtgctgggattacagatgtgagccatctcgccgggccagaggtatgtttttatttttagtttaccagtttaggggtaagcttttataagttacgtgaggagacaaaccagataaatgcttgattggttgcagagatgcagttgccttatttggacttgtcactccgaaataatagaaaggtcaagatttcagttggaagagtttattcaagcggaaggatagcagtggcccatttgggaaaaacacagactctagggaaatagactcagtactccaaaactggaagttaagttcttgcttgtattaccaggaaaagaggtcctgatcagaccccaggagagttcttgaatctcacacaggaaggaattcaagacgagtcacaaagtgcagtgagaagagagtttattgaaagctactctgggccagcatgatggcttaggcctgtaatccaagcactttgggaggccaaggtgggaggataacttgaggtcaggagttcgagaccagcctgggcaacatagtgaaaccccatctcttccaaaactagcaaaaattagccgggtgtggtggcctgcacctgtagtcccaggtgttcaggaggctgatgtgagagaatcacttgaaccccagaggcagaggttgcagcccagccgaggatgtaccactgcactccagtgtgggtaacagagtgagaccccatctcaaaaaccaaaacaaacaggaaagaggtcaagaccaacctggccaacacagcgagaccctgtctctatttaaataaataaataaataaataaataaataaataaataaatagaaaaggaaaaagaaagaaaaagcttctctgtttcagagtagggcatcctcatacagcaagtggaggaacgtactgtctttaagtttttcttatgtagggatcttttctatgtaaagaataaactacctgtgcctatgtgcatgtgggctgacagcatcacaaaatttattactctgttgatttaaagaaaactatcctttacattttagcacccaagtgcattaaaacataactataattatcttgaaagcacatattgttataggtattgggacatcaggacattctattgttgtgggagtgtaaggatacttgcaggcatcttcaggctgttttcttcatgggaaacattttgtgatcatgggttgtgactgacaaggagtgtttcttgttagtgtcaagatggagctgaacttaaattggtgttactctggctcccctaggcacctgcttccctaacacttgtataggcaaaaggcaaataaatgtaacaggattatgttttccatagaaggctgatgtatgagatacaacaattttttttttttttgagacagtatcttgctctgtgacccagcctagagcagtggtgcgatgatggcttactgcagccttgacctccccagctcaagcacctccgcctctcaagtagctaagactacaattgcccaccagcacacctggctaattttttattttttacagaggttaggtctcgttatgttgcccaggctggtctctggctcctggcctcaaacagtcctgcttccttggcctccaaaagtgctgggattacagatacagatatcagccactgcacctggctaacaacttaattcgtaatggtttacttttttcccccagagcttgttttcttttctttctagctggtttttatttccttttcaatttaagagtgaatttaacattccatctgaagacaatctgatagccatgaaatctttgtgtgagaaagtagtctctgggccgggcgcggtggctcacgcctgtaatcccagcactttgggaggccgaggcgggcggatcacgaggtcaggagatcgagaccatcccggctaaaacggtgaaaccccgtctctactaaaaatacaaaaaattagccgggcgtagtggcgggcgcctgtagtcccagctacttgggaggctgaggcaggagaatggcgtgaacccgggaggcggagcttgcagtgagccgagatcccgccactgcattccagcctgggcgacagagcgagactccgtctcaaaaaaaaaaaaaaaaaaaagaaagtagtctctgtagtcttactacagagatcagtagtgaagaggggcctggtaggatggctcacacctgtaaccccagcactgtgggaagccaaggcaggtggatggcttgatctcaagagttcaagaccagcctgggcaacatattgagaccccatctcatttgtgaaaaatcatattaatataagttaaaaaaaatagtggagagggaaagggtctttcctgtttcccttcagtcatttacaacattttacaaaacgctataggtaggaaagaaggcgaatctgtaatcagggaatggaggattccagctagctatgtgaaagctgtgtgtcaggtcactcaaccccatgatcacattgcttcaagataatttaaagatctaccagcttaaatttttgaattactttgttgtttttgttgtttgttttgagatagggtctcactctgtcacccaggctggagtgcaggcgcgatctcagctcactgcagcctccgcctcctgggttcaagtaattctcctgcctcagcctcccaagtagttgggattacagacatgtgccaccacactcagctgatttttgtatttttagtaaagacagggttttaccacactggccaggctagtctcaactcctgtcctcaagtgatccacccaccttggcctcccagaatggtgggattacgggtgtgaaccactgcgcccggcctgactcatttgttcaaacagcctatgtaggtagaaaatttctaggtatgtaattccaaggtaataggtaaattgtgcctgattaagcatgaattttatttccctatacattagtaatttctgagagttgtatttaaattcgatttcagggtccttaggtaggaccttaggacactacacacagttcagtctcattgcttgttatttaaatttttccacactttccagggcaactggttcccccttatattttccaaatatatgggatgccggatctcaaatcctccaccctcataccacagcctaactcttcaagggcttgcagtgaaatctgtttctgaacatttcacatgagaggaaagcagagaataaccactagacatttgcctgaaaaatcctttctgcctctcctccttttatctttcctagacacagacaccttatcaggatgtctttgggatgaggttcctttatggaaactttgcagggtgatatgtcttcagtacaccctcctatcttttccagattttgagttttagaactgcctgtagctgacccaagacccccacaattgccatgtctcttggagggtctagtgggtatctgtgcctaggggagtggggcctcccaagggagcagctgaatgactagtggtggaggagatgcctggtatacttttcatctagatacccagttcgtgggtgctcaccttctctctcctaacttcagtttccattaattggagacacatggccaatcagctaattggatgttgctattgaggaaaaacagaaatgattcctgtcctttggattgtctcaactgtgaagagagaaatatcccaaaagacaaggaaaggccaccccaacaaggttgtatttagctgtcctacagggaggtggtcaccagaatgcagttgtggaacaaatatatgtgagttgaccacatggaggaactgggaggaggtgtagaactggaaactctgttgagtttgagtaaagtttacttctgttatgagaatgttaaatctataatcaaaatgcatgctaaggtaacatatcaatataagaactcactataaccggcaactctagaattaattaaattattgtatatggagatgacaggtagtggattgattattctcctgtagataaccatttgtccctgctttttctgttaagtgttcaccacttgtatcattggctgacaatacctggtttgtcatagtttcacattaccttaaatagatgcccagactgggtgtggtggctcacgcctgtaataccagcactttgggaggctgagactggcatatcacctgaggtcaggagtttgagaccagcctgaccaatatggtgaaactccatctctattaaaattcaaaattagccaagcatagtggtgcatggctgtaatcccagctactcgggaggctgaggcaggagaatcacttgaacctgggaggtggagattgcagtgagccgagattgcgccattgctctctagccagggcaacaagaacaaaattccgtctcaaaaaaaaaaaaaacaacatagatgccctcgtttcacaatttgctgttttccattggtctatctttccatctgtctgttaataccactttctcttaattagtatagagtacaaagctgcagtgtgtagtagggatagtgcctctctatcttagtcatcttgggctgctatatcaaattaccatagactgggtgacttaaagaataaacatttatttctggcagttcttgaggtcatgaagtccatcttcagagagctggcagatctagtgtccagcaagggcccgcttcctggtttgcaaatgatcgtcttcttgtggtttcttcacatgacagaggagaggaagccggctctcctgtgtcttcttataagagcactaatctcattcagaaaggatttactcctatgctctcatctaatcctaattacttcccagagatgtcaccttctaatactatattgggagtaggttattaatgtatgatttttttggattgatgcaaatattcatgccataacacctcccaacaatattctatagaggatcttgtctatttttagtcattgtcttctatttcagtctttagaagtacctttttcttaattttagtgagggaaacaaactgcactgtaaatttcataaaatataactgtaggcatatttcagagaggttacatcatagtgatacttaatctccttttaaggacacatggcatttttccatttattgcattttatactgatgtttttcagtataaactttttgcataataatcattttttatccttcttgagacttttttggacttcaagaaaattagttttaaaattagtggccaggcacggtggctcgcgcctataatcccaacactttaggaggtcaatgcatgcagatagcctgagttcaggagttcaagatcaccctgacgagcatggagaaaccccatctctactaaaaacacaaaattagccaggcgtggtggcagaggcctgtaatctcagctactcaggaggctgaggcaggagaatcgcttgaacctgggaggtggaggttgcagtgagccaagatcccaagatcgtgccattgcacttcagcccaggcagcaagagtgaaactttgtctcaaaaaaaaaaaaagaaagaaaataaattagtccagcctgggcaacatggcaaaccttgtctatacaaaaacttacctggtcatggtgatgtgcgcctgtagacccagctactcaggagactgaggtggaaggatctgttgagcctaggagttcaaggctgcagtgagctatgattgcaccactacactccagcctgggtaacagaacgagaccctgtttcaagaaaaaagaaaagacacaaaaaaattagtttcaatatgctatgctgttgttgctgataattaaaattcactgagatttatttctgtatagagtgtgcattctagaaactaactaaaagtattacatatgcacaaaatacataaaagagttgcacaatgaatccaaatattgatggagtcagtactgtgaacgataactgccttacttttctttatacttccccaacctgggtacccatccacatcagtatattttatttttgcatgttttttatgcaaaccaatatgtgattttttttttttttttttttgagacagagtcttgccctgtcgcccaggctggagtgcagtggcgtgatctcggctcactgcaagctccgcctcccgggttcacgccattctcctgtctcagcctcccaagtagctgggactacaggcacccgccaccccgtccggctaattttttgtatttttagtagagacggggtttcaccgtgttagccaggatggtctcaatatcctgacctcgtgatccgcctgcctcagcctcccaaagtgctgggattacaggcgtgagccactgcacccggccaatatgtgatattttatattggattttatttaaactcagttatgaaccttacatggaatgatagttaattcactttcttatttagttgattttattatttagaacagtggttgtttacccaaaacattgagcagataatccagagttccctcatttttcttccaagctcatagttccccctattttaaacatcttgactggccaggtgctgtgcctcatacctgtaattctaccacttagagaggctgaaatgggaggatagcttggactcaggagttggaggccagcctaggcaacatagcaaggccctgtttcaaaaaaaaaaaaaatgttttaaaccaaggaaaccatattgactgtgtgtagtgtatcctataattgatgcaagaatatattacatgtgaacacgatgaaaattgaagaagccaatattattattacctaaagtccatcttttacatgaaacttcactctttttgggctgtggtttaagacaactacgtgtgtcatgtatccaccatcacagtcttatacagaagcgtgtcacaggcctcaaaatcccctgtgctcttcctaatcatagctctcccctccctcttctgccacccctatttatccctggcaacaaatgataatgttcctgcctcggttttgcattttccagaatattaaatatttggaatgatgctgtaagtggccatttcagacttgcttcctcgatgtaaaaatatgcattgaaggtctctcgatacctttgttgcttgacaactcatgtattttttatttttatttatttatctaaaaaaaattttgtttttgaatggtgtgaacccaggaggcggagcttgcagtgagctgagatggcgccactgcactctagcctgggtgacggagcaagactccatctcagaaaaaaaaaaaaaaaaaatttgtttttgttttgttagagacagggtctcaaacaccccagctcaggtgatcctcccacctcagcttcccaaagtgctgggattccacttgtgagccatcatgtccggccactcattttctttcatcactgagtaacattacgttggatgggtgttaccatagtttctttattcacctactgaaaggctcatcttgagcctggtgtgatgcctcatccctaaattcccagctacatgggagacagaggtgagacgattgcttgaggccaggagttagagaacagcctggtagatacagtgtgagacctcatctatttttttttaaaaaaagactcaccttgtttgagtctagtttttggcagttatgagtaaggctgctaaaaacgtctgtgggaggacttttgtgtggacatcagttttcagttcatttgggtcaatattgtaggattgagactactgaatcagtaggaccatgcttattttcttcagacctccgcagactgtcttccgaattggctgtagaattttccattcacatcgatagtgaatgagtgttcattgtcattggcattaggaagtgtcagtgttttggattttagctactgcaccaggtatttgctgctgcctcattgttttcttttttttctttttttctttgtttgtttgtttgtttgtttggagatgcagtttcgcttttgtttccctggctggagtgcaatggcgcaatctcagctcactgcagcctctgcctcccaggttcaaacgattctcctgactcagcctccagagtgtctgggattacaggcgtgcgctgcctctcctgaccaatttttgtattattagtagagatgaggttttaccatgttggccaggcaggtctcaaactcctgacctcaggtcatccacctgcctcggcttcccaatgtgctggattacaggcgtgagccactgcgcccggcctgttttcatttcgctctttaatgacacgtgatgtagagcatcctgtcatatgtttgccataattacagtctttggtcgggtgcggtggctcacgcctgtaatcccagcactttgggaggccaaggcgggtggatcaggaggtcagatcaagaccatcctggctaacactgtgaaaccccgtctctactaaaaatagaaaaaattagccaggcatggtggcgggcgcctatagtcccagctactgggaggctgaggcaggagaatggcatgaacccgggaggcggagcttgcagtgggccgagatggcaccactgcactccagcctgggcgacagagcgagactccgtctcaaaaaaaaaaaaaaaaaaattactgtctttgtggggaggtatacttggaaagatcttgtttttttttttttttttttttgagactgtgtctggctctgttgcccagtctggagtgcagtggtgtaatctcggctcactgcaacatctgcctcccaggttcaagtgattcatctgcctcagcctccagagtaggtgggattataggcttacaccaccaggcccaactaatttttgtatttttagttgagactgggtttcaccatgttaggctgatctcgaactcctgacctcgatgatccacccacctcagcctcccaaagtgccgggattataggcatgagccactgtgcctggctttttgcttcttttttgattggttgttttttttcttatagaattttaggacttcttcataccttttggataccagtccatcaccagataggcgttctgcaattattttgtcccagtctgtcacctttttattctgttaacaaagtcatttccaaaacagacagttttactttgtttgttttgtttttaaattatactttaagttctagggtacatgtgcacaacgtgcaggtttgatacataggtataacatgtgccgtgttggtttgttgcacccatcaacttgtcatttacattcggtatttctcctaaggctatcctcctcccagccctccagcccctgacaggccccggtgtgtgatgttccctgccctgtgtccgagtggtctcattgttcagttcccacctatgagtgagaatatgcagtgtttggttttctgttcttgtgatagtctgctgagtatgatgatttccagtttcatccatgtccctgcaaaggacatgaactcatccttttttatggctgcgtagtattccatggtgtatatatgccacattttcttaatccagtctatcattggtggacatttgggttggttccaagtctttgctattgtgaatagtgaatattgctttatagtagcataatttataatccttagggtatatacccagtagtgggattgctgggtcaaatggtatttctagttctagatccttgaggaatcgccacactgtcttccacaatggttgaactagtttacagtcccaccaacagtgtaaaagtgttcctatttctccacatcctctccagcacctgttgtttcctgactttttaatgattgccattctaactggcgtgagatggtatctcattgtggttttgatttgcatttctctgatgaccagtgttgatgagcattttttcatgtgtctgttggctgcataaatgtcttcttttgagaaatgtctgttcatgtcctttgcccactttttgatggggttgtttgtttttttcttgtaagtttgtttgagttccttgtagattctggatattagtcgtttgttggatgggtagattgcaaaaattttctctcattctataggttgcctgttcactttgatggtagtttcttttgctgtgcagaagctctttagtttaattagatcccatttgtcaattttggcttctgttgccattgcttttggtgttttagtcatgaagtccttgcccatgcctatgtcctgaatggtattgcctaggttttcttctagggtttttatggttttaggtctaacgtttaagtcttaatccatcttgaattaatttttgtgtaaggtgtaaggaagggatccagtttcagctttctacatatggctagccagttctcccagcaccatttattaaatagggaatcgtttccccatttgttgtttttgtcaggttcgtcaaagatcagatggttgtatatgtgtggtgttatttctgaggcctctgttatgttccattggtctatatatctgttttggtcccagtactgacagttttactttgaagtccaatttatcgattttctcattcacagatcatgctttttgtgttgtgtgtgaaaccttattgccaaatccaaggttgtcatggttttcacaagtgttacgttctagaagttgtgagttttgcattttccatttaagtaaatgattcattaggaggtagttttgtaaaaggtgaagttctgtatctaattcatttctttgcatttgctaatccaggtgtttcagtaccatttgttgtatgccaccatgtctaattatttatttattttattacagagacggggtctccctatgttgcccaggctggtctcgaactgctgggctcaaatgacctgtctgccttggcctctggttttgaatttttaatacatgtctttatagtagatttttctttttttctttccttttttttttttttttgagacagagtctcgctctgtcacccaggctggagtgcagtggcgccatctcggctcactgcaacctccacctcccaggttcaagccattctcctgcctcagcctcccgagtaactgagactacaggtgcctaccaccacgcttggctaattttttgtatttttagtagagacggggtttcaccatgttagccaggatggtctcgatctcctgacctcatgatctgcctgcctcagcctcccaaggtgctgggattacaagtgtgagccaccgcacctggcctatagatttttctacgttccttgtgcctctctgtcatcttatggaatcttctcttgtatagttcattgagtgtttttaatcatgaggagatattaacccatttatgctggagattgcaattttttgaattgcagatgtgtgagaaatcagactttggcaataaccttgaacagtaggatataaataactcccacatgcttagcgttccaaaaatggaacactactcataaatgggctaaggcttgtcagataccttttctgcctctatttattcattcttgtcgttttttgttcgtttggagacggagtctcactctgtcatccaggctggagtgcagtggcatgatcttggctcactgcaacctccatctcccaggttcaaatgattctcctgcctcagcctcccaagtaacagggactacaggtacacaccaccacacctggctgatttttttttaatattatattttaagttctagggtacatgtgcacaatgtgcaggtttgttacacatgtatacatgtgacatgttggtgtgctgcacccattaactcgttatttacattaggtatatctccttatgctatccctctcccttccccctaccccatgacaggccccggtgtgtgatgttcccctccctgggtccaagtgttctcattgttcagttcccacctatgagtgagaatatgcggtgtttggttttctgtccttgagatagtttgctcagaataatggtttccagcttcatccatgtccctacaaaggacatgaactcatccttttttgtggctgcatagtattccatgtgtatatgtgccacattttcttaatctagcctatgacatctgggttggttccaagtctttgctattgtgaatggtgccgcaataaacatacatgtgcatgtgtctttatagcagcatgatttataatcctttgggtatatacccagtagtgggatggctggatcaaatggtatttctagttctagatccttgaggaatcaccacactgtcttccacaatggttgaactagtttacagtcccaccaacagtgtaaaagtgttcctatttctccacatcctctccagcacctgttgtttcctgactttttaatgattgccattctaactggtgtgagatggtatctcattgtggttttgatttgcatttctctgatggccagtgatgatgagcatttttccatgtgtctgttggctgcataaatgtcttcttttgagaagtgtctgttcatgtcctttgcccactttttgatggggttgtttgattttttcttgtaaatttgtttaagttctttgtagattctggatattagccctttgtcagatgggtagattgtaaaaattttctcccattctataggttgcctgttcattctgatggtagtttcttttgctgtgcagaagctctttagtttaattagatcccatttgtcaattttggcttttgttgccattgcttttggtgttttagtgatgaagtccttgcccatgcctatgtctgaatggtattgcctaggttttcttctagggtttttatggttttaggtctaacatttaagtctttaatccatcttgaattaatttttgtataaggcgtaaggaagggatccagtttcagctttctacatatggctagccagttctcccagcaccatttattaaatagggaatcgtttccccatttgttgtttttgtcaggttcgtcaaagatcagatggttgtatatgtgtggtattatttctgagggctctgttctgttccattggtctatatctctgttttggtaccagtaccatgctgttgcgcctggctaatttttgtatttttagtagagatggagttccaccacgttggccaggcaggtctcaaactgctgacctccataattgcacctgccttggcctcctaaagtactggaattataggcatgagtcaccacacctggctgctaccatgatttattatcattacttattggaaaacaaaacttaaaacttaccagcttaaggaattttacacgtacacttgagatagtttgacaaatctacataagttctgtaagatgaattctattgtattttgcttattgcaattatcctgaggtttcacgcatgttgtagtatgtaacaagacgttttcttttttttttttttgagacagcaggctggagttcagtggcacaacctcggctcaccgcagcctctgcctttcaggttcaagcaattctcctgtctcagcctcctgagtagctgggattacaggcatgtgccaccacacctggctaattttgtatttttagtagagacaaggtttctccatgttggtcagactggtctccaactccaacctcaggtgatcgacctgcctcggcctccaaaagtgctgggcttataggcatgagccacagtgcccggccaagatgttattttctaagtataaataatatttcaatgtattgtgtccggaattggtgggttcttggtgtcactgacttcaaaaatgaagccgtggacccttgcggtgagtgttacagctcttaaggtggcgtgtctggagtttgttccttctgatgtttggatgtgttcagagtttcttccttctggtgggtttgtggtctcgctggctcaggagtgaagctgcagaccttcgtggtgagtgttaacagctcttaaggcagcgcgtctggagttcttcgttcctcctggtgggctcgtgatctcgctggcttcaggagtgaagctgcagacctttgtggtgagtgttacagctcataaaagcagcgtggacccaaagagtgagcactagcaagatttattgcaaagagcaaaagaacaaagcttccacagtgtggaaggggacccgagtgggttgccactgctggctcaggcagcctgcttttattctcttatctggccccacccacatcctgctgattggtatagccgagtggtctgttttgacagggcgctgattggtgcgtttacaatccctgagctagacacaaaggttctccacgtcccccccagattagctagatacagagtgttgacataaaggttctccaaggccccaccagaatagctaggtacagagtgtcgattggtgcattcacaaaccctgagctagacacagggtgctgattggtgtatttacaaaccttgagctagatacagagtgccgattggtgtatttacaatccctgagctagacataaaggttctccaaggcctcaccagagtagctagatacagagtgtcgattggtgcattcacaaaccctgagctagacacagggtgctgattggtgtgtttacaaaccttaagctagatacagagtgccgattggtgcatttacaatccctgggctagacataaagtttctccacgtccccaccagactcaggagcccagatggcttcacccagtggatcctgcaccagggctgcaggtggagctgcctgccagtcccgcgccatgcgcccgcactcctcagcccttgggtggttgatgggactgggtgctgtggagcagggggcggcgctcatcggggaggctcgggccgcacaggagcccatggaggaggtgggagactcaggcatgatgggctgcaggtcccgagccctgccccgtgggaaggcagctaaggccgggtgagaaatcgagcgcagcaccggtgggctggcactactgggggacccagtacaccctctgcagccgctggcccaggtgctaagcccctcattgcccagggccagcagggtcggccggctgctccgagtgcggggccgccaagcccacgcccacccagaactccagctggcccgcaagcgccgcgcgcagccccagttcccgctcgcgcctctccctccacccctccctgcaagctgagggagccggctcccgccttggtcagcccagaaaggggctcccacagtgcagcagtgggctgaagggctcctcaagtgccgccaaagtgggagcccaggcaggggaggcgccaagagcgagcgagggctgtgaggactgccagcatgctgtcacctctcagtatgtatatacttaccacattttgtttatccattcagccgtcagtggatatgtgggtggctgcattgctcattactgccaccccaggaaggttgtatagtggttgaatctgtgcttattacacctggtatctcttaggagtttctcgtttggcctcttgtgcacttagggtgccaggttttgcttaggaatgtcccctttcctttgcccttcttaccagcatctatctagctgcattctgacaggataactgcaaagtgaatgattcctgggcatcataatggatgtttctttctacttaggtgtttcccctcctctctgcttatatctagcatgcctgttttgggtggtccctgggggtgtgggctttcccctggacttcccctcctgctcttggctagctatctgccttctctaacaatgtcatcaaagattacactttgggaacaggcattttcaaggaaacacagcctcaggactgctaatgttaacttttttctgcctattaattcataggactccgttatgacaggtgctacagacccacagtccaaagagacattagggacagcccaggcagctcgtttttctccctggatttgtagcaggacaagccgcagacaaaacctctcagacactgggttagagaaggaagtggctttattcggccaggagcgtcagcagacttgcgtcttaaaaaccgagctcccagagagagagaaattcctgccccttttgaaggcttacacagggatccacatgaaaggatcgtgatcaattaaacaaggatggagtgtgtaattggggctgcatgcatcggtaacaggacagagcagaacagaaagactttcacagtgctttctcatacaatgtctggaatctatagataatacaagtggttaggtcaggagttgatttttaactaccaggcctggggtgtggcaccgggctgtctgactattgatctcatttctgccttcctttaacttttgcttcctctttcttgttctgaggtatgagacaataagagaggtggtctccttccttattcccccctttgagaatctcacttattaatgggagttctcactttcatccttactacctaggtcttcctgcaagacagatcaatagtggttaatgtaatacacttgtgctgaaacattttggtggaccaaggtagtgacaaagcttctcattatttgaaggagcacaggtagcaagcaggggagtaacaagcaggtttctattattattattatttctattataagtgttttaaatcctcctagtgctggaaaccattttccaaatacagatttaggattaaacccatgccaaagctgtacaggcacatgtgccaactttgttatgtccttaactatgtttttgactacttgcccttgattatttatatgcagacagcaattggttaggttaaattttccatagacccctcctttagctgctagcaagtagtctagggccagtctattttgatagatagcatttttcatctgggtttcttaccgggctaaaacagttaaagctctgccagttttagtagtgattatttctaagatagcttgtaaccatatgatccggttgagcatgtaaatgggggtctcttttttttctgttttagctattttttttacttctattacctagaaaagaactagtttttaaatcttatttcaaagactgtgatcatgggaggctcagatgggttatggtacacatcaggtcgggcatttcctgggttacacactttgtactgagtggtgttatacaggcaagttccttttaaagttcctaggcattcataataactagaaaaccgaaagattgttttaacttgttgccctacctcagtaacctgatgaatacactgggaacaatcttccatgtggggaaaatcagttgaagtccttattctacaagtccaaattttaaggagaataagtcccatgatgagtttcctcatgctttggccgcacatagaccagtcagcttccaggtgtgacaggagcagggcttgtcgtctttttcagagtcactttgcaggggttttccaggtttggtcctgcctcccaggagctgcaggttttacatgactgtggtggatccaggccgggattccctctaccttcacggtggtgtgagtggtctgtggtcccttccaccatgggcacaagggggctacattccagtccttgatccacactctattacctggggagaaagggtgaactggggagaataagctaatggggcgtttctcgtttacctaggctgagattgttcgtgtaatttttcgtaaggcctgtagctgtcgctgtaacttaatttcacctaattctcagggagtgcctggaagtccccatactatgggaggagggctatgatataatatttcataaggggaatatcctgtttttctagaaggggtaaatttaatcttaataccacagggagagcttgtacacactttaatcctgtttcttgacacactttccctaaactatttttgatagtccaattcatccactccacctttccggaactctgaggttggtaggcagcatgcagtatccatgtgatccccaatacctttgctgtcttctgtaccaagtcagccacaaacgctggcctgttatctgagccaattcgtaagggcagttcaaacctaggaataagatcttgaagaagcacacgggttacttcaccagctttctcagttcgcgttggataagcttccacccacccagagtatgtacacacaagaactagtaaatacttgttatcttcacattttggcatttctgtgaagtctacctgcagatcttcaaagggggctgctccataagcttgtatgccagccgggacggttggaccctgccttgcattgtgttgttggcaggtaatacatcgctgtgccactgtttcagcaagggctgataaatgtgagatgtagaagtaccggcttaacaacttttgaagtgactcctggcctagatgggtggttttatgcacagccagtatgactgtggctcccagcagctgtggcacagctactctcccatccagtaaccacatccatccttcttccatcacctgtcctccctctgcctggagaaagtccttttcttctttagaataagtgggtacaaggtaggccactggccttggccagggccccacagtctgggttagaactccaactgcctttttttctttttctgacacagtgtaaaaggctttgttagattaggtagccccagggctgggactgacataagtttttcctttaactcatgaaaggctcactgttgttgggattcccattcaaaaggttcccagcacccctctttgtgaccccatatagaggtttggccagtactgcaaagtttgggatccacagtctgcagaaccctactgctcctaagaattctctcacctgccttctggttttaggttgcaataggctgcagatgacctgctttctttctgagcttgattgaccaagcacaagtcctgtactggcctgtagttcttggtccctggcttgggaacaggcaggagggtagtgttccatggagactggcaaaggactataattccaaaggctctcaagtgcttgaggtggacctggattccttcaagagcttctctagggaaccgggtactgtttttgcctgaccggctgggccccaggcttaacttctgtaggtacgggggtttggttgactgccagccctggagggttgtcttctgcccacacctttgaccatcacttagccagagctggtcttatctcttgacctggctcggttaagaaaagtcttcattcctcctcctgggggacagtaagggccatgatgactccctttccgggtaactttagctgtaaaagagctgtgctctgtaagagagatggtggctctcagcttgctaagcaagtcccttcccagcaagggcaaggagaagtcgggcatgtacaagaactggtggattacttcatgtacccctatagtacaagtgcagggcaagcagaaagcttgttttgccgagactcgtgtggcttcgattatatcaatagtctttttggataagggggtgaccggggtggttactactgaatattcagcaccagtatcgacaagaaactctatgtccttgtccctgactgtcatcctgaccatgggctcgttaggggcacctgagcctggtcccccttagtccagtagcccttctgccagattaaacaaggccctttcatccttgcctgagacctctggcttggagccattttgtttcttctttaactgggggcacttgtctttccagtcttagatcgtaaatgagctgccaagggaggggtttctcccgcagcttcacattctctcttgtctgttctgggtggtctaggggtgtatctgtccagaggaggcacaggtgctgtgggctcaggagtggggagtctctcttctaggtaaggacggggggcattgctgtgccatttcctgccatgggtcctctgacattgggtcagatagaactttaggagctgacttcccttggcgggtggggagagatccctcattggctatctgtccctttgccactaacactgctgctgcctgtcctctcaaccactgtggggggtctaaaaccagctgtaactaagtgtctgtgtacaggaacttgtctggataccctggcttacaggtaatcttgtgccatacctttgaaataagggacctatccaggcttccttctgatggccaacccacctctaatgctggccagtctgtctcacacaaagttctaagttttcctggtgttatagtaactccatagtctcccttaaatccctttttgaaattttttataacatagttcctagtggggtgggcttactttgtgtctgacccatttttctttcgagacaagacaacactcacactacaagagggaaagggtaaaggtcactcacgcgtggtggtacatgcctataatcccagctactcgggaggctgaggcaggagaatcgcttgaaccccggtggtgagccaatatcacgccattgtactccagcctgggcaacaagagtgaaactctgtctcaaaaaataaataaataaataaattgctttatggaagaaagtaagtatagatggagagaaagggatctgataaccgaagcagggaataaatgtttggagtccacagcatcctgagaacttcttgggaatagagtctaggcctccagtgctgtcactctcacccatcttcctctacacatgtgagatgtttcaggacccagtggcctttgaggatgtggctgtgaacttcacccaggaagagtggacattgctggatatttcccagaagaatctcttcagggaagtgatgctggaaactttcaggaacctgacctctataggtaaggatgacaatattccttccgtcagtgcattagcaaaccagtgtttctagctcatgaatgctgttgagtgattttgaacatagacaggaaataccttgatgaataaatgaggcatggctgcagtaaatcatgggcacagaatctaataattttttcacaattttatactgcttcaggactatttttctgtgtctgtattttaggaaaaaaatggagtgaccagaacattgaatatgagtaccaaaaccccagaagaagcttcaggtaatttgcatttccaagagaaagcagtgtctctctgcacaatcttagaatatgagaatatgttgaagagaagtaaaacaaagaactaaatccagcatcaaattcatttcttcttagaatattttctcaaaaaacatatatttaaacgtgactgaggctgagggctcactcctgtaatcccagtcctttgagaagtggagataggaggatagcttgaggccatcagttccagaacagcctgtgcaacataacgagaccacatatcaacaacagcaaaaaattagctgggcattgtggtgtgtatgcatcggtagtcccagctactcaggaggcgaaggcaggaggatcactcgagacttcaggagttaaaggctgcagtaagctatgatgatatcactgtactccagcatgggcaacaggacaagaactggactcaaaagaaaaatgacatacagtatttagtaattgtaaaatagtttacatgggaatactattaagaagccccttatgaatatttttttaaacaataggtatggctgggtcatcttgtagaacatgtccagtcaccttcaaacgattcagacagggcagaaagcctacactttgatggacagtgttaaaaatgcaagtgcaatacttgttgattaatatagaagtacttgtaaacaaacccttcatgatgtgtttctcatgttttacaggagtctcatagaagagaaagtcaatgaaattaaagaagacagtcattgtggagaaacttttacccaggttccagatgacagactgaacttccaggagaagaaagcttctcctgaagtaaaatcatgtgacagctttgtgtgtgcagaagttggcataggtaactcatcttttaatatgagcatcagaggtgacactggacacaaggcatatgagtatcaggaatatggaccaaagccatataagtgtcaacaacctaaaaataagaaagccttcaggtatcgcccatccattagaacacaagaaagggatcacactggagagaaaccctatgcttgtaaagtctgtggaaaaacctttattttccattcaagcattcgaagacacatggtaatgcacagtggggatggaacttataaatgtaaattttgtgggaaagccttccattctttcagtttatatcttatccatgaaagaactcacactggagagaaaccatatgaatgtaaacaatgtggtaaatcctttacttattctgctacccttcaaatacatgaaagaactcacactggggagaagccctatgaatgtagcaaatgtgataaagcatttcatagttctagttcctatcatagacatgaaagaagtcacatgggagagaagccttatcaatgcaaagaatgtggaaaagcatttgcatataccagttctcttcgtagacatgaaaggacccactctgggaaaaaaccgtatgaatgtaagcaatatggggaaggcttatcctatcttataagttttcaaacacacataagaatgaactctggagaaagaccttataaatgtaagatatgtgggaaaggcttttattctgccaagtcatttcaaacacatgaaaaaactcacactggagagaaacgctataaatgcaagcaatgtggtaaagccttcaatctttccagttcctttcgatatcatgaaaggattcacactggagagaaaccctatgagtgtaagcagtgtgggaaagccttcagatctgcctcacagcttcgagtgcacggtgggactcacactggagagaaaccctatgaatgtaaggaatgtgggaaagccttcagatctacctcacaccttcgagtgcatggtaggactcatactggagagaaaccctatgaatgtaaggaatgtgggaaagccttcagatatgtgaagcaccttcaaattcatgaaaggacagaaaaacacataagaatgccctctggagaaagaccttataaatgtagtatatgtgagaaaggcttttattctgccaagtcatttcaaacacatgaaaaaactcacactggagagaaaccctatgaatgcaaccaatgtggtaaagccttcagatgttgcaattcccttcgatatcatgaaaggactcacactggagagaaaccctatgagtgtaagcaatgtgggaaagccttcagatctgcctcacaccttcgaatgcatgaaaggactcacactggagagaaaccctatgagtgtaagcaatgtgggaaagccttcagttgtgcctcaaaccttcgaaagcatggtaggactcacactggagagaaaccctatgagtgtaagcaatgtgggaaagccttcagatctgcctcaaaccttcagatgcatgaaaggactcacactggagagaaaccctatgaatgtaaggaatgcgaaaaagcattctgtaaattctcttcttttcaaatacatgaaaggaagcacagaggagagaagccctatgaatgtaagcattgtgggaatggattcacatctgccaagattcttcaaatacatgcaagaacacacattggagagaaacactatgaatgtaaggaatgcggaaaagcattcaattatttttcttccttgcatatacacgcaaggactcatatgggagagaagccatatgaatgtaaggattgtgggaaagcattcagctagcctggttccttttatggacatgaatagactcacactggaaggaagcactatgaatgcaagcaatgtggcaaaactttcacattttccagttcttttcgatatcatgaaaggactcacactggggagaaaccctatcaatgtaagcagtgtgggaaagccttcattccttttacttcttttcaatgtcatgaaaggactcacacgggagagaaaccctatgagtgtattctagttccgtttgatatcatgaaaggacttacactggagtgaaaccctatgaatgtaagcaatgtgggaaagccttcagatgtgcctcgcaccttcaacggcatggaagggttcacacttgggagaaactctatgaatgtaagcagtatgggaaagccttcagatctgccaagattctttgaatacagataattaatgtaaacaattatcataagtatactaacatgttattctttttaaataagaaggtataataaaatatcccattggttttatgtattagatcaagcttataatgttacattgttattatttggacattgtgagtcagtattaccatgtggataaaatgccaggcatctttttcctcatggaaagtttactttttgcaccgggcacagtggctcacgcctgtaatcccagcactttgggaggccaaggcaggcggatcacgaggtgaagagatcaagaccattctgaccaacgtggtgaaaccctgtctctactaaaaatacaaaaattagctgggcatggtggcgcgcaccggtagtcccagcttctcgggaggctgaggcaggagaatcgcttgaacctgggaggcggaggttgcagtgagcagagatcacaccactgcactccagcctggcaacagagcaagactccatctccaaaaaaaaaaaaaaaaaagaaagaaattttacttttcatgcttatgtacttattttttatctcaaccctaattttgctggtttttgttttttttttttctgatagtctcattctgtcgcccaggatagagtgcagtggcgcagtctcagctcactgccacctccgcctcctaggttcaagtgattctcctgcttcagcctcctgagtagctgggactacaggcgtgccccacctcacccagctagtattcgtatttttttagtagagatgggatttcaccatattagccagactggtctcaaactccggacctcgtgatctgcccacctcggcttcctaaagtactgggattacagacatgagccactgggcccggcctcaaccctaatttttcattcactcattatgccaaaagttatctcatatacctctgagtgccttcttccccaaaaccaccagtgccatacctgctgtcagcaagggtgtaatatactgtagtggtaaatatgaccacaagtcataaatgactgtgggatgtatgagaattacaagtcacattagtaagaagagaaaaattttggtcatgtttatgatttgaaatatgttttcttttatcacatttagaaatatagttataaaatattctctttttttgtcctgatccatcatggtcactgaggagcatcgtctcatatgcccggtatgtgacttgtgtctctccaatggtaaaagccttggccttggccagacactgtggctcacgcctgtaatcacagcacattgggaggctgaggcaggcggatcacctgaggtcaatactttgagaccagcctgaccaatatgatgaaaccccatctctactaaaattacaaaaattagccaggtgtggttgcatgctcctgtaatcctagctagtcaggaggctgagacaggagaatcgcttgaatctcgggggagggcagaggttgcagtgagccaagatggcgccattgcactcctgcatgggcaacaagagtgaaactccatctcaaaaaaaaagacttggccttgtgatgaggggaggtcagctctagactcttggaccgggttttgccttacttattctctaaagactaaaatatttcctaaaatgtatgggcactgtttactagaaagtaccttagttaaaacatacaaattcatttatgccttataaagctatattttttcaaattgttttactaagtcataggaagctaatacagttgtgtaaattgtctgaatacaagcctttctttctctgataatgtgctgttgatgctaacttgtcaacagcctgcttatctcagcagtgtaaagttaacagcaacgtggaaaagtaacttttatatattatgcaatggcatagaacaattcagtcacttcccttaaggtaccaatgaagctgctcttcagaaacccttatttaaaaaacactgtcaaaatccaggcaccaaaggatgcagcatcaatcattgaccaaaccctatctgtgtgtggagatgacatacccagtctcagataatgcatcctcatcagtgaagggtggagtcattgattgtcagatcacacaaagtgactcacagcagggaagacagggcagtggcagagatgggggcacctgaccaggtgcagtggctcacacctgtaatcccagcactttgggaggctgaggcaggtggatcacttgaggtcaggagttgaagaccagcctggccaacatggtgaaaccccatctctactaaaaatacaaaaattagctgggcatcgtggtgtgtgcctgtaatcgcagctactcaggaggctgagacaggagaatcacttgagcctgggaggcagatgttacactgaactgagatcacgccactgcactctctagcctgatcaacagagcgagactccatcacacacacacaaaaaaaattaaaaaagagttgggtgcacctggatctaacccctgtctcatccttctgccttgaaggccaaatgcaccctgatacttttcaccaaagagtagaaacaccaccatccacttgaccccaaatgtgactttccacaggatgcaagcacagtgttggaatagccaaagacagtaacaatagaagtgcagggtgagggtgatgaacaggacacactggagagcctgacattggcctagactacgggggtgtcttgatccttcacaaagagcccaaggagcaacccaaagagacactggagcacaggcccaaagggtgttcatatgccaggaaggccactaattttagaaggcagtgatgttggttcctgttggagtcctgatcctttataacatatgcttttctgcatctggttagacaaggaaatctgcaatttttgacttgcagcatttagaaataagttattttagcaatccacacactcgtggtttattctgaactaacttgagacaaacagctacagatagggaatatcatgagtatttccaagactaaaactcttcacaaagtcagtgggaccctctcatgggagggttttaagacccacaataaaaaaggtggggaaacattgagtggaaagagggcagcaggtcaggggccttccccagaggcctaacacacccaacattaccctggatgaaaacaaatacataccataacatcacactttcttcaatgtgtaacagagaaaatgaaatgtattcaaaggtaagctttcagaattccactttacacaattaataaggttttaatattactctgtgttgatgttaaggaattattaaatatgaacagcattttctggttatatatggaaaataccttgatttatgaggtatgaaaatgctcatttttacgtatgcatgttttacttttgtgctttttttataaaacaaggtgaaaaaacaggaaaaaaatttcagatcaaggaagttaagcagattaataggagaaaagttatacaaatttatttaacatgtatatatgggagccttcagaatgaagacccacccaacaataagacaaaaacttatataccattccagggtaggaaagaatgcagatgtggcatggccaaaaaatcccaggtttgatgggtaagtcaagtttaatagcaagacagattctgcaagaggaaaggaagaagcttggctagcaaagcagacctttttatgcagatgaaggctccctcagagagaataggtgggaaattctgcttttcattcagactttcatttagaattttaagtaatagagtcaggattatgctatgttgcttgggttgctctctaattgtttgtctcaagcagtcctcccagctcagcctcccaaagtgctgggattcgaggcatgagccaccatgcccagacaaggtttgtctccttataaagaattattcattgctgggcacagtggctcacatctgtaatcccaacaatttgggaggccaaggcaggaggatcacttgagcccaggagctcaagaccagccacagcaacatgacgattccctctctctacaaaaaatacaaaaaattagctggatgtggtggcacataccatatccaggaggctgaggcagaaggagaaccaaagcctgggaggttgatgctgcagtgagctgtgattgtgcccctgcactccagcctgggtaattgagtgagggcctttgttaaaaaacaaaaaacaaaaaaaattgttcacttattgcagcttcagattttttttaatgaattgtaaattgcattttcattacaattggaaagataagaaaattttgcacagagcccagataaagacagatttcagaaaaatatcatttgtcttatatagagtttgtttcaaaaaaatttttttttttttttttttttttttgagacaaagctttactcttgttgcccaggctggaatgcaatggctcaatcttggctcactgcaacttctgcctcccaggttcaagtgattctcctgcctcagcctcctgagtagctgggactacaggcgcataccaccatgcctggctaatttttgtatttttagtagagactggatttcaccatattgggtaagctggtctcaaattcctgaccttgtgatccgcccacctcggcatccgaaaatgctgggatacaggcgtgagataccgtgcccagcctgaaaattcttgtttaatttttttcttccttagaggccgtgtagtacatttcttggtctatcctttttcgtggatgatttctttttctttctttctttttttttttttttgagacaaggtctggctctggtgcccaggctggaatgcagtggcacaatctcagctcactgcagccttcatcttccaggcttaagctatccttccacctcagcctccctaatagctgagaccacaggtgcacgccaccatgcccaaagtgctgggattacaggtgtgagccaccgtgcctggccatttatgcatcatttctaacagtttcagggcttagctttgggaatgctgcttgggaaaagaaatagggaaaatcttttattacagctggagaaaaggaataaacttctacaacaaagtatagtagataatcagtgaattacaaagattcggaaaaatatcagtcctcctttgcaggttggagaacttgtaacggtggataactcttctcttcctgttatctgtggggtaagacctggctggcaactgttgtgatatgtttatattcacatatggttaatgtgtagtatgtgctttgttatggaaatcataatgaagtaataatgtccaccttaataagataataaaattcagataatatgattaaatattgagtttatgtgaacacaaagtttgagggtagccactggggaaacacatcctgaagagtggggtcactgctcccactcttaactggagaagttaagtcttcacttctgtagggcaaaatgaagatgcttaatagggttacattttccatacaaagccaatgcatatatttcaatgatttcattggttgccgcttgccaaattgcagcttaccaaatttcaaggatgattgctttaactttttgtaaggaggggtagtggtatcaaaaggatcctacctctggcacttctcagtgttttctaatgacttatagcccaagaacaaggaagagagttaatctttttgacatgcacacggaaggagcaattacatggtagcgtaaacacatttctcaatatgtttattgagtgaaagggttagatactttccctgatgaggggtgataggtaagtgccttataatttccttccagcctataataaaccgagtttgagagattttgccggattcttcaaacactgggtattttctcattgaaacagaggcctgagtccagtgactgcaaactaaagccagtgagaaacctacaaagagaggtcattgaaagctcacaccaggcgcagtggctcacacctgtaatcccagcactttgggaggccaaggcagatggagcatctcaggtaaggagtttgataccaacctggccaaaatggcgaaaccccatctctactaaaaatacaaaaattagccaggtgtaggggctcaagcctgtaatctcagccattcgggaggctgaggcatgagaactgcttgaactcggggcggaggctgcagtgagccaagatcacaccattgcacttcagattggatgactgagcaagactctccaaaaaaataaataaagctcacctggttcttcccatggtgctcccactgcaggtgttttcagctgctcaaattgaccatgggaggagcgctttatactgacagaacctcagatccctggaaagctagggatccacaggcagatacagtactcagtgatgccctccgcaagtgacagtttttgtcatggagcttttcctagacgtttctagtgaaacaaatgtaggtttcagtaagaaataagttttttttttttttttttgagatggggtctcgctctgtcgcccaggctggagtgcagtggcacgatctcagctcactgcaacctccacctcccggtttcatgccattctcctacctcagcctcccgagtagctgggactacaggcgcccgccaccatgcccagttaattttttctattttttttagtagagatggggtttcaccatgttagccaggatgatctcaatctcctgacctcgtgatctgcctgcttcggcctcccaaagtgctgggattacaggcgtgagccaccgtgctcagccaagaagtaacttttaattaccttaatgaccctgaaatcagcttgtcattaggagaggtcataaaaagagtctaggtactgaacttgcaagtaaaaataaaaatattaaataaatacataaagtggggttgcatataagcctagaagggatcagtcaaaaattcaggggtggctgggtgtggtggctcatgcctgtaatcccagcactttgggaggctgagatgggcagatcacttgagatcaggagttcaagaccaccctggccagcatggtgaaacaccatctctatgaaaaatataaaaattagctgggtgtggtggcacacacctgtaacaccagctagtctggtgactgaggcatgagaatcacttgaaccagggaggcggaggttgcagtgagccaagatcatgctactgcactccagcctgggctacagaacaagactgtctcaaaaaaagaaaaaagttcagggacctggaggaaggagagaaactgaagcatgctttggtagatagatatttcattttgactaaagatcactaaagagaaaactgttcacctaatggtttgtgaggtaaatactggaatatctagtgggtgtctggtttgtcataggtaacaaacgtggcaccatctaattcaccatgggaagcttgtttcattgtagtaaggtgctcttgcacaacacaaaggatgggggatttcatgaatcacagccattttcaggattgcccacccacccccatctcctttccacaccccttactctttttctatccatgtctctgatttgactcgtcctgagttgtatccttcatagtaagtgggtaaatataagtgaactgtgggtagttctatcaaattatggaacttgagtaaggtgttgtacaggacccaggtctagatgcagttgctgagaagtacaggtggcccctagggctttgagtggcatctgctgagtggggctgtgttgggtgagccaggaactcatggagtctctgctaactctgggtggcttctgaattgagtggttgcatgactgcttagtgctggagaattcgctggtgttcagcaagcaccacacatctggtgtcagaaacaaaagacaccataggtcagaaccttccactgactcacagtgagcgagtggtctttggtgggcattgagaccccggtggaaggactgtgtccacactgtggggaggggctacaagggtgttagtagaagtcccagaattaattttctggctgctcacatttccctcacacactgcctaggagtgggccagcctggcctgtgtctccacagtccaagtggttcctaagcttgggaatgtgtaactattggagtgtgggtttccttgtgagctgtgggtgaggcaggctgcctacctgagctgcctccgttttgtttcttttatagaatcttgctaccatggaattgctctttctgcatgcatcagatcattcattcgtttgtttgctcatttatttatttatttatttttcaaacagaatctcactctgtcgcccaggctagagtgcagtggcgtgatctcggctcactgcaacctctgcctcccaggttcaagcgattctctttgctcagcctcccaagttgctgggactacaggcacatgacaccacaccttgctcatttttgtgtgtgtttttagtagtgacagggtttcaccatgttgaccaggctggtctcaaagtcctgacctcaagtgatccacctgcctcagcctcccaaagttctgggatttcaggcatgagccattgcacctggccacatctgagaattttgttttatgatttgggtgttaggattttaattagctggttggaaccttaatgagtagtttggtaacctttgcagaaggaaatagttttttaataagctgttttatgccaagtcaaaataataacaatatgaatactcagacacataccaccccaaaaaataaataggccttgggcagttctggtgtgtctccttggtctcacttatttttgatatgcaaaggtgatcaaagttttgattctttttgttattctttgtatctttgtcatctctttgtcacaaagcagaattttcccacttttgaattctcagtaacataatgttaccattaatacaccattagtattatgctgagagggtgtgtttctgggttttttgcctgagcctgttgtagacatgctgctctgtgaagttgtgggtcatgtaattgattctcttatttcgctgcttaatgggacttgagttggttcaagtctatcttttgatcttattgatagtactcttcttgtttttgtccctaattggaaataattgctggcttgtagattatggataaattcaaatttactatgaaatgtcgatagagtatgaatgtaacttctgaattaaccatctcacctttcatgcacgtgtctttattcttgtgatttgtcaacactttgaattatctaactcactttttgttgcccatctactcttaagtagaatctctgtaagattatgtattttttcactggttgccattggttgagcatttttcctatatgatctttcatcttctgtgttgcagttcccagtcatcctcttacatttgactaatttgtagtgttttttttttcttttttttttttttagacaagagtttggctctgttgtccaggctggagttcagtggcgtgatctcacctcactgcaacctctgcctcctaggttcaaataattctcgtgccttagcgtcccggggcgcataccaccacccccagctaatttttgtatttttagtagagatggggtttcaccatgttggccaggatggtctcaatctcttgaactcgtgatctgcccgccttggcctcccaaagtgctgggattacaggcgtgcgccactgcgcccgtctcttgttttcttgtttttaatttgagacaaccttgctctgtagcccagctggagtgcagtggtgtggccactcactgcccactgcagcattaagctcctaggcttgagcaatcctctcacctcagctttctgcccagataatttttaaaagttttttgtagagacaggggtctcagtgttttgcccaggctggtctcaaactcctgggctcaatgaatcctcctgccttcgcctcccaaggtgctaggattgcagacatgatccaccacgctcagcaatgagcggtttttttttttttttaaaccaagatatctgtacatgtttctgacaaatattttatttaaaatctttaacaactgcatactaaccaaggttattctgtttttcattttcattatgactacttgtttttctttcttattctcattttttacctaattaaaataatttaccatgtagtggccctggcatgcattttgctccttcatacagtcatacagctacctcgatgtcccttctttctgccattctgaaattggacctcattccttgactcttgctccccatctgctatgtgataaagtcctgtctgattacattgtctccaaagcctcttttatagacttccatttgccccttggcatgtcttgcatttactctcctcgaaatatatacttagaggccaggtgtggtgactcacacctgtaatcccagcactttgggaggccgaggcaggaggatcccttgagcccaggaatttaaaaccagccagcgccacagagggagaccctgtcttaaaaacaaaatttatatgtacaagccctaaaccccaacacggtcatatttggacacgacgaaccttttaggatatcacataacatttataaaagagggccctcataatgggattagtgagagagagagagaactctgtctctccaacatgtgaggacaaagcaagaaggcatctagctgcaagccaggaagatagccttcactaggaacaaaattgctggcagcaagattttggattccccaagctccagaactgtgagaaacaaatttctgctgtttaagaaactgagtccatggtgttttgttatactagcctgagctaagtcaccccaagagtcctcacattaaccatatactgtcatacaagtgctgcatttggatctacctggaatgtctccaaattttctgcttttcctcttggacccattgtgagaataggtttgcttcacaggaaactgctggtaatagtagtgatagcctaacagctagggacaaaaaggaaactttctttttctttttctgagatggagtttgtgctctgttgcctaggctggagtacaatggcgcgatctcaactctctgcaacttctgcctcctgagttcaagggattctcctgcctcagcctccagagtagctgggattacaggtgcgtgccaccacatctggataatttttgtattgttagttagagatggggtttcaccatgttggccaggctggtctcgaactcttgacctcaggtgatccacctgcctcggctttccaaagtgctaggattataggcgtgaaccaccacgcttggcctcttttacacacacacacacacacacacacacacacacacacatatatattgttttcttttttaaataaaaataaatagaaactaggtctcactatgttgcccagggtggtcatagcccaagattttggtctccagcgatctatctgccttggccaccccagtgctgggattaaggcgtaagaaactgtgctcggccaaatgaacgaaacttagtgggaggacgggcgtggtggctcacacctgtaatcccagcacttgggaggctgaggggggtggatcacctgagctcaggagttcaagaccagcctggacaacatggtgaaacgctgtctctactaaaaatacaaaaaattagccgggcatgatactcccactctcatagtgagagaaagattctttcttaaggattctacctgctggaaagcattatatactgccagcacttgttcaatacaagactttctggtttcatctccatgtcctgtttcccaggctggagtgcagtggtgggatcatagctcactgcagaaactcctgggctcaagggatcctcctgccttagcctcccaagtagctgggaataaaggcacatgccaacatgcccgactgtttttaaatttttttgtacatatggagtctcactatattgcccaggctgttcttgaactcccaggctcaagtgacccccccccacctcagcctcccaaagtgctgagattacagtcatggaccaatactcccagccctgaaacagatatatttcaaagggagaacatctaatgttcaagttggtatctatagagcagttaaccggaactatcatttagggtctgtgggattctaggacactaggtatgaaacaaatatgaggaaggtcagagaacaagctgacttaatgattaatgctgaaggtgctgcaagcttggtttaagttttcctcctcccatcctccctgatgaatttgataaagtttaaagggatggtttcaccaggggctttttccattgactgcaaggaggtcatcctgcctggtaaatcctcagtaggccaagcctcttatgtggcggaatgatccagtcgatgaggaaatatcaccacctgttatgttttacaattagaccatccaagggggtcagggtttccccaggtagtttggtgagagagagagagagtgtgtgtgtgtgtgtgtgtgtgtgtgtgttttgagacagtgtcttgctgaagtgcagtagcctgatcatagctcacagcagcctcaaactttgaggctcaagtgatcctcctgcctcagcctcctgactagctgagactataggtacacaccacctctccaggctaattctaaacaaagatgtatggagttgggagggtctcacttcactgctcagggtgatctccaacttctgtcttcaagtgctcctcccactttggcctcccaaaatgttgggattacaggcgtgagccatggtatccggcctcccaggctgttgttgaaaggtttttgcaatctctcagagttatgcagcagtttattccctcacagtgatactctcatcctttgaccccattttgcagcagtggttgagcgttcacttttctttccataagggggtgagcttgccggtgactctcttccccctcctcatcaatgacttctttgtcatcagagccttcctcttcataaattcccacggaatccaagttttcacgtcccaatcgggcttagttatgatagccacaggcccacaccagctgccacagcacccccgtcccatggaaaccgcccgactctcttctccccaagcgtcctgtcccgggagcccccatctctgctctcccgggctccgggccctagatccgcgctgctgtagagcccagttcccagagtagctccctccacctgtccacatccagctccagctctccaccctctctccaggcctggagttgctgcagtgtcactgatcaggggaccctcagctgccacctccaccgcgatctgaaagtcttttaaatgcacttaagttatcttagaattttcctcgcccattttatacataaacataggaggagagcaggggtttgagggtgtttgtctcatggaactgatcagtcgggtgagaagtagctgaataacctgcagggggcagcagagccccaggccagtgactccacgccgaggccagtgtggatcctgcaaaggaagagaaagagagattccctggggtcttcccgggcagcccgccctcccctacaagtggcctccagccgctcagagcagctccagaaggagtgtggattccgagaagctgcagagccctggaaagcagaagagacgtgcagacgcctttgtggggttctgtcctttctggtgttgtacctctggagcctggggctgtcttctgggcagggtttggggtttgacacgcatggggtcgctggaggcagagttgtttgtatatataaagagaatgtgtgaatatcaggctagagacagaattgtttgggggcgacacctggataaagggttcatgaagttgacagtttatttaggtcagaaggttaaattaaccccaggtgagagtttcctgctggtgaaaatgaagatctggaagcagggagcattttcacactgtgaggaggggatgggggtgtgtgagcaaggcttggccatgcctcattcccaattccggcccgctcaaggacatgtgcctctcctgatgcagtcgtgcctggcctggtctcggttcccctgctgctctgaggccagcagatggctcctatggacactgagtctgaaattccctgcacactcctgtgaccccgtgcagaacgaaggagcggggaaaatcccttgagtgaggaagacgctagtgttctcttatatctgtagcaagtctggctgaaatgcaaatatccaataatcagagtacaggaagcacctcgcccttagagaagctgtggctagaatccgtcaagtcagtctggctctgccgggcctgatacccaaggcttccgctgtcactcagaagtgaggggcggggcctagcattccatccaatcagaggtgccggggcagggccctgcccattgtttatccaggcacagagtgggtcgcattcctgtcctcacctttgtccttgcgcagccggtggttgatatccgctgtatccatccccgagagggacctggtacctctacccaggtttctatcgctctgtctcctgcgctgtgcccttctgtagtcacaggagctgtagagaggaccccaggacatctgaaagccaggaaatggtgcgtgtgcatagccggttgtcccgagacggggtagaggctgcctggaaccggccggaaccggctgcggcgggacccgggcctccctgcgggcgactccagggtctgggaccgagtcctcctggagctgctcggccctcggtcccctcggccgctggatggggctgggctggcagccgggaccccgggtgtcctgtcctgtccctgcgcggtgactgcggccccgccccggagccctctctgggcagttccgcgcccgcagccccgcgtctccccagattatgcggaagccacgagagggtcatgggggaaatcctgactcgtgtgtagggttcgtgcgtgggaggagcagtggtctgtggggcccccagttcccactttctcctgttaaaaattaaactgaagtacattaacaattaaagagttcatttgagcaaacagcaattcagtaatgagaaccacccagtcctggcttgtggtttgtcaactgaaaaagccaaacaatgtaaaataaagtttattcgtagccaaataggagagaccttggcaagggaaacacaaccccaagaagcctatagtgagtggtcccgaggcggctcaagacaatttggttttattcatttcagagagacaggaattgcagggaaaatcatgaatcagtgcctggaaggtgtaagttccattggcagaaagggcgggacctgtggaaggggggttagaaggcacaggtggttgagggattctgtaggtggcagttgattgagagtgtgaagtttgtctaaagtttggaggaggtaggaaggaatgctgaaggaagggggtctgttatctgccacttgattccatcccagccaaaaaacagacctgtttctcgagattttatgaattccaaggcatgacttacccttaccttgcgtggccttaggtcttgtttgtaatttggtatcttcttgccacaaggagtctgtttttccagtcagataatgtctgtttttacatgaatgtgcgtcagttgctgcatgtaaactcctaaagggagagggtataaggagacctgtctcacctgccatcctgtcatacagaggcactcaattttcagggttttttgggggttcccttggccaagagccagtcacttcacttaactgggaaggtactttgtttgtttttgtttttgtttgagacagaatctccttctgtcgcccaggctggagtgcaatggctggatctcggctcacagcagcctttgccttctgggttcaagcaattctcctgcctcagcttcctgagtagctgggattacagacatgcaccaccatgcctggctaatttttgtatttttagtaaagattgggcttcaccatgttggccaggctattctcaaactcctgacctcaagtgatccacctgcctcggcctcccagtgtgcggggattacagatgtgagccacctcgcctggccgcaaggtatgtttttaagtttgcaggttgaagactgggcttttataaggtacatgaggagacaaatgagataaatgcttgattggttgcagagatgcagttgccttatttggacttgtcactccgaaataatcgaaaggttcagatttcagctggaagagtttattcaagcagaaagatagcaatggcccaaacaggaaaaacacagactctagagaaaaggactcagtcctccaaaattggaagttaagttctggctttatattaccaggaaaagaggtcctcatcagaccccaagagggttcttggatctcacacaggaaggaattcaagacaagtcgcaatgtacagtgtgtagagagtttattgaaagctactctgggccagcatgatggcttaggcctgtaattcaagcacttttcaaggccaaggcgggaggatcacttgaggtcaagagttcgagaccaccctgggcaacatagcgaaacctcttctcttccaaaaataacaaaaattaactgggtgtggtggcctgtgcctgtagtcgcaggtacttgggaggcttaagtgggagaatcacttgaacccaggaggcagaagttgcagcccagccgaggactcgccactgcactccagtgtgggtaacagagtgagaccccatctcaaaaaacaaaaacaaaataaacaagaaagagttgaagaccaacctggctaacacagcaagaccctgtctctattttgtttttttttgagacggagtctcgctctgttgcccaggctggagtgcagtggcgcgatctcggctcactgcaagctccacctcccgggttcacgccattctcctgcctcagcctcccgagtagctggactacaggcacccgccaccacgctcggctaattttttgtatttttagtagagacggggtttcaccgtgttagccaggatggtctcaatctcctgacctcgtgatccacccacctcggcctcccaaagtgctgggattacaggcgtgagccaccatgtccggcccctgtctctatttttaaaaaaagaaaaaagaaaaagaaggaatgttctctgttacagagtagggcatcctcataaagcaagtggaggaacatactgtctaagtttttgttatgtaggggtcttgtctatgtaaagactaaactaagctgtgcctacgtgcatgtgggctgacagcgtcacaaaatttattactctgttgatttaaagaaaactatcctttaccttttagcacacaagtgcattaaaacataactataattatcttgaaagcacatactattatgagtattgggacatccggatgttctgtcgttgtgggagtgtaaggatacttgcaggcatcttcaggctgttttcttaatgtcaaacatgttatgaccatgggttgtgactggcaaggagtgtttcttgttagtctcaagatggagctgattggtctttctctggctcccctaggcacttgcttccctaacacttatataggcaaaaggcaaataaatgtaacaggattacattttccatagaaggctgatgtatgaggtacaataatttaatttttttttttctttgagacaatgtctagctctgtggcccaggctggagcagtggtgcgatcatggcttactgcagccttgacctccccagctcaagcacctcagccttcccagtagctgagagtacagttgcccaccagcacacctggctaattttttgtattttacagaggtggggtctcgatatgttgctcaggctggtctcttgctcctggcctcaaacagtcctccttccttggcctccaaaagtgctgggattatagacatgagcaaatgcatgtggataacaacttaatttgtagtggtttgcttttttcccccagagcttgttttcttttctttctagctggtttatatttccttttcaatttaaaaaagtgaatttaatattctagctgaagacaacatgatagccatggagtctttgtgtgagaaagttaagagggaaattagtgtactatagagatcagtagtagagaggggcctggcgggatggctcacacctgtaaccccagcacgttgggaggccgaggcaggtggatggcttgatctcaggagttgaagaccagcctggcaacatagtgagaccccatctcaattgtgaaaaatcatattaaatttaaaaagacagtgacaagggaaagggtctttcctgtttcccttcagtcatttacaacattttacaaaacactataggtaagaaagaaggcaaatctgtaatcagggaaaggagggttccagctagctaggtgaaagttgtgtgtcatgtgactcaaccccatgatcacattgcttcaagatgatgtagagattcatcagcttaaatttttgaattacttggttgtttttgcttgtttgtttgttttgagacagggtctcactctgtcggctaggctggagtgcagcggcgtgatctcagctcactgcagcctctgccttctgggttcaagtaattctctggcctcagcctttccagtagctgggattacaggtgcgtgccaccacactcggctaatttttctatttttagtaaagacagcgttttatcacgttcgccaggctggtcttgaacttctgtcctcaagtggtccatccaccttggcctcccaaagtggtgggattacaggtgggagtcactgcaccgggcctgacttacttgttcacacagcctatataggtagaaaatttctagttatgtaatcagcggttaattggtggattgtgcctgattaagcataaatttcatttccctatacattagtaattttcacgagttgtatttaaatatgatttcaggatccttaggtaggaccttaggacacctcacacagtttggcctcattgcttcttatttaaattttttcacattctccagggcaactggtttccccttacattttccaaatatatgggatgcagcgtctcaaatcctccaccctcataccacagcctaactcttcaagggcttgcagtgaaatctgtttctgaacatttcacatgagaggaaagcagagaataaccactagacatttgcctgaaaaatcctttctgcctctcctccttttatctttcctagacacagacaccttatcaggatgtctttgggatgaggttcctttctggaaactttacagggtgatgtgtcttcagtacaccctcctatcttttcctggttttgggttttagaattgcctggggctggctcaagatccccacaactgccatgtctcctggagggtctcatgggtattagtgccttaggggagtgggacctcccgagggagcagctgaatgccttatggtggaggagatgcctggtatactcttcatctacataaccaattcttggggtgctcagcttctgtctcccaactccactttccattaattggagacacatggctgttctgccaatcggatgttgctaatgaggaaaaacagagatgattcctgtcctctggattgtctcaactgtgaagagagaaatatcccaaaagacaaggaaaggccactccaacaaggatgtatttagctgtcccacagggaggtggtcaccagaatgcagctgagtaagtcccatatgtgagttaaccacatggaggaactgggaggaggtggagaaccagaaactgttcagagtttgagtaaagttttcttctgttataacaacgttaaatccataaagaaaatgcatgctaaggtaacatataaataaaagaattcactgtaacaggtaactctagaattaattaaattattgtatatggagatgatgagtagtagattgattattctcctgtagataaccatttgtccctgctttttctgttaagtgttcaccacttgtatcattggctggcaatacctggtttgtcatagtttcatattaccttaaatagatgtccagagcaggtgcagtggctcacacactttgggaggctgaggctggcagatcacctaaggtcaggagtttgagaccagcctgaccaatatagtgaaaccccatctgtactgaaaatacagcattagctgagcatggcagcgcatggctataatcctagctacctgggaggctgaggcaggagaatcgcttgaacctgggaggtggaggttgcagtgagccgagatcccgcctttgccctccagcctgggcaaggagagtgaaacctcatttcaaaaaataaaaaaaaaactaaaaaactagatgccctggtctcacaatttgctgttttccattggtctgtccttccatctctctgttaataccattttctcttaattagtgtagagttcaaagctgcagtgtatagtagggatattgcttctctatcttagtcatcttgggctgctacatcaaattaccatagactgggtaacttaaagaataaacatttgtttctgacagttcttgaggttgtgaagtccatgttcagggagttggcagatctagtgtctggtaatggcccgcttcctggtttgcagatggtcatcttgtggtttcttcacatgacagaaaagagaggaagctggctgtcctgtgtcttcctataagagcactaatctcattcggaaagcatctacctttatgctctcatctaatcctaattaattcccagagatgtcaacttctaatactatagtggggggtaggttattaatgtgtgatttttttagagtgatgcaaatattcatgccgtaacaccctccaaccatattctatagagcatcttggctgttcttagtcattgtcttctatttcagtttttagaagtacttttttcttaattttagtgaaaaaaacaaactgccttataaatttcatggaataaaatataactgtagtcgtatttcaaagaggttacatcatagtgttatttaatctccttttaaggacacatgacatttttccatttattgcattttatattgatgtttttcagtgtagactttttgcataataatcattttatatccttcctgagacttttttgggcttcaagaaaattagttttaatagaaatttgtggccgggcgcggtggctcacgcctctaatcccaacactttgggaggccaatgtggatggatagcctcagttcaggagtttgagaccagcctgacaaacgtggaggtttccatgtctactaaaaatacaaaattagccaggcgtggtggcagaggcctgtaatcccagctactcaggaggatgaggcaggagaatcgcttgaacccaggagacagagattgcagtgagccaagatggtgtcattgcactccagcccaggcaacaagagcaaaactttgtctcaaaaaaaaaaaaaagaaaagaaaagaaattagtccagcctgggtaacgtggcaaactttgtcaatacaaaaacatacctggtcatggtgatgtgtacctgtagtcccagctactcaggaggctgaggtagaaggatctgttgagcctaggagtttgaggctgcagtgagctatgattgcaccaccacactccagcctgggcaacagaatgagcctgagaccctgtttcagaaaaaaaaagggaagaaaagaaaaaagaaaaaaatgagtttcaatagagtatgttgtcttttaaaaattacattcaacaggttgtggctgataattgaaattcactgagatttatttttgtataaagtgtgcattctagaaacttagtaaaaatattacatatgcacaaaatacataaaagaattgcacaatgaatccaaataatgatggagccagtattgggaataagataattgccttactttttatactttcacaacctgggtatgcatccccatcagtatattttatttttgcacattttttatgcaaatgataaccaatgtgtgatattttatattggattttaactcagttatgaaccttacatggaatgatagttaattcactttcttatttcattgattttattatttagaacagtggttgtttgcccaaaacgttgagcaaataatccacagagttcccacatttttcttccaagctcataattccccctgttttaaacatcttgactggccagatgctgtgcctcatacctgtaatcctaccacttagggaggctgaagcaagaggacagcttgaactgcagtgttggagttcagcctaggcaacataacaagaccctgtttcaaaaaaaaaaaaaatcattttaaaccatattgactgtgtgtagtatatcccacaattgatgcaagaatatattacatgtgaacacgatggaaattgaagaaaccaatattattattacctaaagtccatcttttacattaaacttcactctttttgttctgtggtttaagacaactacatgtgtcttgtatccaccatcacagtcttatacagaaacgtttcactgccttcaaaatcccctgtgctcctcctaattctatctctcccctccctcttttgccacccctatttatccctggcaacagatgatgatgttccttcctctagagttttgcattttccagaatatcacatatttggaatgatgctgtaagtggccatttcagacttgcttctttcatgtaaaaatatgccttgaaggtctctcgatacctttgttgcttgacgactcatttattttttatttttatttatctaaaaaaattttgttttgtgagagacagggtctcaaactcctcagctcaggtgattctcccacctcagcttcccagagtgctgggattcctcttgtgagccaccacgttcggccactcattttctttcatcactaacattccattctatgggtgttaccatagtttgtttctttattcacctattgaaaggctcatcctgagcctggtgtgatgcctcatccctgaattcccagcatatgggagactgaagtgagaagattgcttgaggccatcagttagagaccagcctggtagatacagtgtgagaccttgttaattttttttttttttttttaaagactcaccttgtttgattctagtttttggcagttatgagtaaggctgctaaaaatgtttgtgggaggacttttgtgtgaacatcagtgttcagttcatttaggttaatatgtaggattgagactactgaatcagtaagaccatgcttattttcttcagagctccacagactgtcttccaaattggctgtagaattttccattcacatccatagtgaaggagagttcactgtctccagcatttggaagtgtcagtgtttgggatttaggctaccccaccaggtgtttgctggtgcctcattgttttctttctttctttctttccttctttcttttctttctttctttctttctttctttctttctttctttctttctttctttctttcttttctttctttctttctttctttctttctttccttccttccttccttccttctttctttctttctttctctctttttttttgttttttgttttgtgtctagttcttgttacctaggctggagtgcaatggcatgatctcagctcactgctgcctctgcctcccaggttgaagcaattctcctgactcagcctcccaagtagctgggattacaggcgtggtcctccactcctgataaatttttgtattattagtagagatgacattttaccatgttggccggggtggtctcaaatttctgacctcaggtgatccacccgccttggcctcccaaaatgctcaattataggtgtgagccactgcccctggcctgttttaatttactctttaataacatgcaatgttgagcatcccgtcatatgtttgtttgacataattacattctttagggggaggtatagttggaaatattttgcctttttttgggcgggggggtggggtgtaatctggctctgtcgcccaggctggagtgcgggggcatgatctcagctcactgcaacttccacctcccagattcaaacaattctcccacctcagcctcccaggtaactgggactacaggcacatgccaccacacctagctaatttttgtatttttagtagaaatggagttacaccatgttggccaggctgatcttaaactgctgacctcaagtgatacgcctgccttggccttgcaaggtgctgggattacaggcatgagccaccacacctggctgctaccatgattgattttcattacttactgtgaaacaaaacttaaaacctatcagcttaaggaattttacatgtacagttgagatagttggagaaatctacataagttctctaagatgaattctattgtgttctgccttttgcaattatcctgatgtttcttgcatgtcatagtacgggccaagatgttattttcttttttttttttctcgttgagactgagtgttactgttgttgcccaggctggagtgcaatggtggaatgtcagctcaccacaacctccgcctcccgggttcaagcgattctcctgcctcagttctcctgagtagctgagataaaacgcatgtttagtaaagatggggtttctccatgttggtcaggctggtctcgaactcccaacctcagatgatttccgccccacccacaccccccaaagttctgggattacaggtgtgagccactgcacccggccaagatgttattgatttttttttttattttattattattttttgagacagagtcttgctctgtcgcccaggctggactgcagtggcgcaatctcggctcactgcaagttccgcttcccgggttcacgccattctcctgcctcagcctcccgagtagctgagactacaggcgcccgccaccgcgtccagccaatttttcgtatttttagtagagacagggtttcactgtgtcgatctcctgacctcgtgatccgcccgcctcggcctaccaaagtgttgggattacaggcgtgagccaccgcaccccggcctttaagatgttactttctaagactaaataatatcccattgtatgtgtatgcttactacattttgtttatccattcagtcatcagtggatatgtgggtggctgcactgctcattactgccaccccaggaaggttgtatagtggttaaatctatgcttattacacctggatatatacacctggatataaactggagtttcttgtttgccctcttgtgtacttacagtgccaggtttttcttaggaatgtcccatctgcccttgttatcagcatctatctagctacactctgacaggataactgcaaactgaatgattcctgggcatcataatggatgtttctttctacttaggtgtctcccctcctctctgcttctatctagcatgccggatttgggtggtccctggggtgtgggatgtcccagggactctctctcctgctcttgggtagctatctgccttctctaacaatgtcatcaaagattacactttgggaacaggcattttcaaggatacacagcctcaggactgctaatgttaacttttttctgcatattaattcataggactctattacgacaggtgctacagacccacagttcaaagagacagtagggacagcccaggcagctcccttttctccttagattcagtgaatgcacacattttcccaacccactgtggctttaccccttgttgagttctagcatcacaattgctttatgaaccagccgagcatggtggcacatgcctgtggtctcagctactcaggaggttgagtcataagaattgcatgaactcaggaggaagaggttgtagtaagccaatattgtgccactgcactccagcctgggcagcagaacaagactctgtctcaaaaaaaaaaaaaaaaaaaaaaaattgctggccaggtgtggtggctcatgcctgtaatttcagcactttgggaggccgaggctggcggatcacctgagatcaggaggtcaagaccagcctgaccaacatggagaaaccctgtctctactaaaaatacaaaattagccgggtgtggtggcgcatgcctgtaatcccagctactcgggaggctgaggcaggagaatcgcttgaaccccggtcatgagccaagatcgcatcattatactccagcctgggcaacaagttgttgttttgaaaatccatctcaaaacaacaacaacaaaaatgctttatggaagaaagtacagaaagcgagaaagggatgtgatgaccaaagcagggaataaatgtttggagtccacggcaacttcttgggaatagagtctaggcccccactgctgtcactctcacccagcctcctctacacatgtgagatgtttcaggaccctgtggcctgtgaggatgttgctgtgaacttcacccaggaggagtgggctttgctggatatttcgcagaggaaactctacagggaagtgatgctggaaactttcaggaacctgacctctataggtaaggatgacaatattccttccctcagtccattagtgaaccagtgtttctagctcatgaatgctgttgagtcatttggaacatagacaggaaatactttgatgaataaatgaggcatggctgcagtaaatcatagacatagaatctaataattttttcacagttttatattgcttcaggactacttttctgtgtctgtattttagggaaaaagtggaaagaccagaacattgaatatgagtaccaaaaccccaggagaaacttcaggtaattggcacttaaagagaaagcagtgtctctagatgattttagtatatgataatatgttgaagagaagtaaaacaaagaactaagtccagtatcaaattcatctcttcttagaatattttctcaaaatcatatatttacatgtgactaagtctgagggctcactcctgtaatcccaatcctttgagaagtggagataggaggatagcttgaggccagcagttcaagaacagcctgggcaacataatgagaccacaaatcaacaacagcaaaaaattagctgggcattgtggtatgcatcgtagtcctagctactcaggaggctgaggcagaaggatcactcaagcccccaggagttaaaggctgtggtaagcaatgatgatatcactgtactccaggatggtcacaggatgagaccctgactcgaaagaaaaatcacacagagtatttagtacttgtaaaatagtttacatgggaatagtattaagccccttatgagtatttttttaaacaataggtatgactatgtcaccttgtagaacatgttgtccatttaccttcaaacaattcagccagggcagaaagcctacaccttgatggaccatgttaaaaatgcaagtgcaatacttgattaatacaaaattactcataaacccttcataatgtgcttctcacttttgacaggagtctcatagaagggaatgtcaatgaaattaaagaagacagtcattgtggagaaacttttacccaggttccagatgacaggctgaacttccaggagaagaaagcttctcctgaagcaaaatcatgtgataactttgtatgtggagaagttggcataggtaactcatcttttaatatgaacatcagaggtgacattgggcacaaggcatacgagtatcaggactatgcaccaaagccatataagtgtcaacaacctaagaaagccttcagatatcacccctcctttagaacacaagaaaggaatcacaccggagagaaaccctatgcttgtaaagaatgtggaaaaacctttatttcccattcaggcattcgaagacgcatggtaatgcacagtggggatggaccttataaatgtaagttttgtgggaaagctgtccattgtctcagattatatcttatccatgaaagaactcacactggagagaaaccgtatgaatgtaaacaatgtgttaaatcctttagttattctgctacccatcgaatacatgaaagaactcacactggagaaaagccttatgaatgtcagcaatgtgggaaagcattccatagttccagttcttttcaagcacataaaagaacccacactgggggaaagccatatgaatgtaaacaatgtggcaaatccttcagttggtgtcattcctttcaaatacatgaaagaactcacactggggagaagccctgtgaatgtagcaaatgtaataaagcattccgtagttacagatcctatcttagacataaaaggagtcacacgggagagaagccttatcaatgtaaggaatgtagaaaagcattcacgtatcccagttcccttcgtagacatgaaaggacccactctgcgaaaaaaccttatgaatgtaagcagtgtgggaaagcattatcttataagttttcaaacacacctaagaatgcgctctggagaaagaccttataaatgttagatatgtgggaaaggcctttattctgccaagtcatttcgaagacatgaaaaaactcacactggagagaaaccctataaatgcatgccatgtggtaaagccttcaatctttccagttcctttcagtatcatgaaaggactcacactggagagaaaccctatgagtgtaagcaatgtgggaaagccttcagatgtgccccacaccttcgaaggcatggtaggactcactggagagaaaccctatgagtgtaaggaatgtgggaaagccttcagatctgcctcacaccttcaaattcatgaaaggacacaaacacacataagaatacactctggagaaagaccttataaatgtaagacatgtgggaaaggcttttattctcccacgtcatttcaaagacatgaaaaaactcacactgcagagaaaccctatgaatgcaagcaatgtggtaaagccttcagtagttccagttccttttggtaccatgaaaggactcacactggagagaaaccctatgagtgtaagcaatgtgggaaagccttcagatctgcctcaatccttcaaatgcatgctgggactcaccctgaagagaagccctacgagtgtaagcaatgtgggaaagccttcagatctgccccacaccttcgaatccatggtagaactcacactggagagaaaccctatgagtgtaaggaatgtgggaaagccttcagatctgccaagaaccttcgaattcatgaaaggacacaaacacacgtaagaatgcactctgtagaaagaccttataaatgtaagatatgtgggaaaggcttttattctgccaagtcatttcaaatacctgaaaaatcttacactggagagaaaccctatgagtgtaagcaatgtgggaaagcctttatttctttcacttcttttcgataacatgaaaggactcacactggagagaaaccctatgagtgtaagcaatgtggaaaaaccttcagatctacctcacaccttcgaaaacatggtaggactcacactggatagaaaccaaagcaggtgaatcacctgaggtcaggagttcaagactggcctgatcaatatgatgaaacccctgtctctactaaaactacaaaaattggccaggcgtggtggcctgcttctgtaatcctagctagttgggaggctggcacaggagaatcgcttgaatctggggggcagaggttgcagtgagccaagattgtgccattgcactctagcctgggcaacaggagcaaaactccgtctcaaaaaaaaaaaaaaaaaagacttggccttgtggtgaggggatgtcagctctagactcctggagctgtttttgccttattctctaaagactaaaatatttcataaaatgtatgggtgctgtttaccagaaagtacgttgggtaaaacatagaaattcatttataccttagaaagctatttttttcaggttggtttagtgagtcacaggaagctaataaattacaataataatgtaaattgtctaaatacagccttttctttctctgataatgtgctgttgatactaacttgtcaacagcctgtttatttcagccatgtaaagttaatggcaacatggaaaagtcacttttatatgttatgcaatggcatggaaaaattcattttcattaaggttccaatgaagctgctcttcagaaacgcttatttaaaactccctaaggtcaaagtccaggcatcacgggatgcagcatcaatcactgaccaaaccctgtctgtgtgtggagatgacatacccagtcccagataatgtatccacatcagtgaagggtggaatcattgattgtcagatcacacagcatgattcacagcagggaagacagggcagtgacagaggtgggggcacctgagcaggtacggtggctcacacctgtaatcttagcactttgggaggccaaggagagtggatcacttgaggtcaggagttcaagaccagcctggccaacatggtgaaaccttaagaaatagataaattagctgggcatcgtggtgtaatccctgtaatcccagatactcaggaggctgaggcaggagaatcgcttgagcctgggaggtggttgttacactgaactgagatcacaccattgcactctccaacctagtcgacagagcaagactctgtctcaaaatgaaaaaaacaagagttgggtgcacctgaatccaacccctgccttatcctcccttgaaggccaaatacaccctgacacttttaaccaaacagtagaaacaacaccatccacttgaccccaaatgtgactttccacaggatgcaagcacaatgttggaatggccaatgacagtgacaatgaaagtgcagggtgagggtgatgaacaggacacactggagagcctgacattggcctagactatggaggtgtcttgatgtttcacaaaaagcccaaggaccaacccaaagagacactggagcacaggcccaaagggtgttcatatgccaggaaggctactaattttagaaggcagtgatggtgcctgtttgagtccggatgctttataacttctgcttttctgcatctgcttagacaaagaaatctgcagtttttgagtttcagtgtttagaagtaagttattttagcaatctacacacttgtggtttattctgagctaacttcagacacacagctacagatagggaatatcacgagtatttccaaggctaaaagtcttcatgaagtcagtgggaccctctcatgggagggttttaagacccacaatcaaaaaggtggggaaacattagagtggaaagagggcagcaggtcaggggccttccccagaggtctaacacacccaacattattaccctggatgaaaaccaatacatatcataacaccacacacactcttcaatgtttcacagacaaaatgaaatgtattcaaagctaagcttccagaattccactttacacaataaggttttaatatcactctgtgttgatgttaggcaattactaaatagcattttctggttatctatggaaaataccttgatttctgggatatgaaaatgctcatttttagatatgcttgtttttgaactttttttaataaaataaggtgagaaaacaggaaaaaaattttcagatcaaggaacttaggcgaattaataggagaaaagtcatacaaatttatttaacatgtatatatgggagccttcagaatgaggacccacccaacaataagacaaaaaagcttacataccattctgaggccaggaaaaatgcagacttggcatggccaaaaaaattccaggtttggtggggaagtcatttttaatggcaagacagattatgctaaaggaaaggaagaagcttggctagcaaaggagaccttgttatgtagatgaaggctccctcagagagaataggtgggaaatgctgcttttcagacttttatttagaattttaagtaatagagtcaggattatgctgtgttgcccaggctgttctctaattctttgtctcaagcagtcctcacagctcagtctcccaaagtgctaggattccaggcatgagtcaccatgtccagacagggtttgtccccttgtaaagaattattcattgctgggcacagtgattcacagtgacgtctgcctggcatctgcctgtaaaggaagcatggcaccagcatctgctcagcttctggtgaaggcctcaggaagctttcaatcatagcggaaggtgaacggggagcaggcagtcacatggcgaaagcaggagtgagacagagagagtggtgtaggaaggtgcagctcactagaactcactgattatcacaaagacagcaacaagccatgagagaaacaagccataggtccccctgacccaaacaactcccatcaggactcacctccaacactggggattgcagttcctcatgacattgggtgggaacatacattcaaactatcacgtgacaatattacttccctcagtttattaaagaacaagtgtttctagctcttcagtgctgttcagtgatttggaatatggacagggaaaactttgataaatcaggaatggctgcagtgagccatgaacatagaatctaataatttttaaactaattttataatagctgggcatggtggctcatgcctgtggttctagcactttgagaggccaaggtgggtggatgacttgaacccaggagtctgagaacagcctgggcaacatggtgaaaccctatctctacaaactttttagccaggatggtgacatgcacctgtaatcccagctacttgagaggctgcagtaggagaatcacctgaacccaagaggttgaggctgcagtgagctgtgatcatgccattgcactccagcctgggtgatagagtgagaccctcatctccaaaaaaaaccccataattttataatcaggactattttttatggatctgtattttaagaaaaaaatggaaagaccagatcattgaagatcagtacaaaaatctcaggaataatctaaggtaagtttccctcacaagataaagcattctctctctagaaaatcttatactgcctgaaaatgttttggtttttttggagacaagagtttcactcttgttgcccagactggagtgcaatggctcaatcgcggctcatcgcaacctccgcctcccaggttcaagtgattctcctgcctcagcctcccaagtagctgggattacaggcgcccaccaccacgtctggctaattttgaatttttagtagagatggggttactccatgttggtcgggctggtctcgaactcctgtcctcaggtgatccgcctggcttggcctcccaaagtgctgcaattacaggcgtgagccattgtgcccggctgaaaatgtttaaaatatgcaaataaaagaaataagaccagcatcacatttatttactcttagaaaattttctctaaaaacataatatttaaatgtgacataggctaggcacagtggctcacacctctactcccagccctttgggagaccaaagccagatgattgcttgaggctaggagtgagaccagccaaggcaacatggtgatacatcacctcattaacaaaaaatgttagctgcgcatggtggcacttgcctgtagttcctgctatttgggaggctgaggcaggaggatggcttgagcccaggaattccaagctaccatgaaccatgctcaattagacccctgccttatcacaaggacagagggctttctgtatcctaaggttcttgccttggtatactggaagaattgtatcacacgtgggcttggagaatgagtgcaagttttttctttttttttctgagaaagggtctcactcttgtcgcctaggctggagtgcagtggcctgatctcggctcactgcaacctccacctcccaggttcaggtgattctcctgcctcagcctcctgagtagctgggattacaggcacctgccaccatgcccagctaatttttgtacttttagtagagatggggttttgtcatgttggccaggatggtctgcaactcctgacctcaggttatccccccatctacgcctcccaaaatgctgggattacagatgtgagccactgcgcccggccgaaaatgcgaactttctcctttgggtactaccattttggtgggcatcagatccatgcccgagctctgtgggcgctgctgcctctctccacctcaggcaccacatcccaggagccccaatcccactgcctggcttgtgctttagaacagctgctgctgcagggccctcagctgccactaccaagttgcgatttagaagtcttttaatgcatttaaatatcttagaatttgtcttccccactttatacacacaatcatgaggagagcagggactctattggtgtcttattcacacagtgggattgagggtgtttgtctcatgaaactgatcaatgaagtgagaaacagctgaataacctacagggggcagcagagcctgaggccagtgtgggcctgcaaaggaagggaaagggagttccttgggggcttccggggctccccgccttcccctgcaggtggcctccagctgcccagaacagctgcagagagtgtggattctgagaagctgcagggccctggaaagcaggagacccacgtgcaggtgcgcttagggggttccatcctttctgaggttgcccttctggagcctggggccattttctgggaagtgttttggttttgacatgtatagggtcgctggggtcagaatgtaattgttacatatgaagaaaatctgtgaaggtcagcctcagtgagacttgttgggtttgtcttataacagggtttatgaaattgacagtttatttaggtcagagcttaaattatcaccaggtgagagtttcctgctgaggaaaatgaagatctggaaggagagagcatttctacactgtgagggggcgcggagtgggggtgaggggagcgaagatgaggatgctttggctttgcctcatctgcatttctggctctctggaggacatctgcttctccctcctggtgtggtcattcttggcctggtctgggttcccttcctgctctgaggcaaagggggtggctttgtgggggcaataggcccttggtgtctgtcctaaaggtttgctgaaaactcattgacatgaggcagttggagtaactctgaaaaggcatacaaatttatttagtgtatacacacaagagccttcagaatgaagactccccagcaataacacagaaaagcttatataccatcctgaggacagcaaagaatgcagactcattatggtccaaaaatcacatgttatgttggcaaatcggatgtagtggcaagacatcttctgagagagggaaagaaaggggcttggctagcaaagatggactgttatataaatgaagcctctcacagagagaagagaaatgcttcttttccaactttttaacatttttctttttatttggatacttaaataatgaaggtgggagtctccctgtgttgaccaggccttcaactccttgctttaaggcagggatgtccaatcttttgccttccctgggccacactgaaagaagaattgtcttgggccacacataaaacaaagctgatgagctaaaaaaaaaaaaagaaaaaagaaaaaagaaaagaaagaaaaaaaatcgcaaaaaaactgtattttttttttttagccagagtctcactctgtcgcccacactggagtgtagtggtgtaatcttggctcactgcaacctccaccttcgggttcaagcgattctcctgcctcagcctcctgagtacctgggactacagacgcctgccaccacacctggctaatttttgtatttttagtagagatggggtttcacatattggccaggctggtcttgaactcctgaccttgtaatctgcctgcctcggcctcccaaagtgctgggattacaggcgtgagccacagtgcacggcagaaaatcgcaaaaaaaatttttaaatattttaagaaagtttactaatttgtgttgggctgtattcaaagccgtccttagcccgcaggccataggttggacaagcttgctttaagggatcctccagcctcggcctccggaattgctgggataggaggcgtgagtcacggcttcctacctgtgttcaggttttaaagacgtcagaccccgaatctctactagttccagtgaagggaaataagcagggaggaggccatggctttgttaacggagattctccgcagatgcgcattttcctcccaaaggcacctttgcaagaccacactgttggccaagcggccacgatttcaaaatatgtcaaaggagtaaccgggcgcggtggctcacgcctgtaatcctagcactgtgggaggctggggcggatcgcttgagctcaagagttcgagaccagcctggctgaaaccccgtctctactaaaaatacaaaaattaacaggggtggtggagcacacctgtagtcccagctactagggaggctgagacagtaaaatcgcttaaacccaggaggtggagattgtcgtgagccaggatagcgccactgcactccagcttgggtgacaaagtgagacccagtgtcaaaaaaaaaaaaaaaaaaaagtcaaatatattttggagtaaaaaaatttaatttccttcacctccgttggactcttgagtctggaattccctacacacatttgtgaccctgtgcaggacgaaggaccccattgagtgaaaaagacaacagtgtcccttatagcagttaggagcaagtttggctcaaatgccagtatccgaagagcagggagctgaaagtgagcccatttagggaacctgcggctggaatagcagcgaccggctctgcagcgccctgttacccggggcttctgctgtcactcagggctgagggggcggggtaggatgccctatccaatcggggtgctggggcggggccctgccaactgtttaatccgccggaaggagggcgcagcattgccggtcttctcattgcctggctgctagaggaaacccgaagtcgggattctttctttcctgctctgagagggaccaggtccctcctccgtagcttttgtctctctattgcctgcgccgtgtcctggactgctcacgggagttctgcaggagacgccggaatatctggaagctgaaaaatggtgagtgtgcggagccggaaaccccgaggtgggtttgggggttaggggacggtctagtcagaaccgcggaatcggaacgcgggcctccatgttgcgactcgggggtctgaggcccgagttcccctggcgcagctcagccctgggtccccttggcctcagggtgggtctgggcggcagtcgggaccccaggcgtcctgtcgtccctgctcggcgactgggacccctgccccggagctctctctggggagctctgcgcccgcagccgcgcgtctccccaaattgtgcggaagtcgtggagggaatcccgcctcgtgtgtggggttcccagtcgcacgtttcttctgttaaaaattaaactgagacactgttaacaagtaaagagtattttgggtaaacagccaatcatgaaggagaaacaccgggtcatgacttgttaacggaaaaaaaaaaccaaacagtaaaataacttaaagaagttttattttgacctggcgtggtggcttacacctgtagtcctagcactttggctggccgagatgggtgggtcacctaaggtcaggagtttgagaccagcctggccaacaaaccctatgtagggtccagccctactgggcctgtgggtttttttcctcgtgtgcggagacaagagatcatagaaataaagacacaagacaaagagaagaaaagacagctaggccggggggaccactaccacctaggtgcggagaccggtagtggccccgaatgcctggctgcgctgttatttattggatacaagacaaggggggagggtaaggagtgtgagtcatctccaatgataggtaaggtcatgcgagtcacgtgtccgccagacagggggcccttccctatttggtagctaaggcggggagagaggacagcttatgtcattatttcttctatgcatttcaaagactttagtactttcactatttctgctgctgctatctagaaggcagagccaggtgtacagggtggaatatgaaagcggaccaggagcgtgaccgctgaagcacagcatcacagggagatggtcaggcctccggatggctgcgggtgggcctggctgatgtcaggccttccccgagaggtggtggagcagagtcttctctaactcccccggggaaagggagactctttcccagtctgctaagtaacgggtgccttcccaggcgctggcgttaccgctagaccagggagccctctagtggccccgtccaggcgtaacagagggctcacacttgtcttctggtcacttcttaccgtgtcccttcagctcctatctctgtatggccatgtttttcctaggttataattgtggaagaaatataattataatattggaataaagagcaatgctacaaactaatgataatgatattcatatataatcatatctataatctatttctagtataactattctttttctatatattttctttattatactggaaacagcttgtgccttcggtctcttgccttggcacctgggtggcttgccgccgacatctcccccgtttttattgactaggatcgtcatcgccatcattgcttgtcgctgacttcggacttgtcctcggactccttggagacatctgcagactagaagtagacaacataaacataccaatattaataatgccagtgacaacaatgatcctccgaggggtttgatccatttaaagggattaagatcagacaatcttttagttattccctcaaaaatgtctgagccagggcagtagttaaatgagactgtgaggcctcaaaaatttgttctttaagttttgaaatatttaaggttaaattatcatcctattctaaatgatgaggttattgaacaattatgaaaatgttgcctagatgcttgggataagattcaagatgatggcaaagtatgtccatcttttatgcccgtcagacagggacaacatgaaccctatgcagacttcattgcccatcttcaagacgcagtagaaaaagctatccctgatagccatggccaatgacttcttgtagaacttatggcttatgatcaagcaaatccagatttcttctccttatcactgtttaggaatgcagctagaagctagaagacaagaattaagccccacgatggtcacttctcatcgtgtcccttcagctcctatctctgtatggcctggtttttcccaggttataattgtagaacaaagattattataatattggagtgaagagcaatgctacaaactaatgattaatgatattcatatataatcgtatctataatctatttctagtatattcttattctatatattttctttattatactgcaacagcttgtgccctctgtctcttgccttggcacctgggtggcttgctgcccacaaccccgtgtctaaaaatacaaaaattagctgcgcatggtggtgggtaccagtaatcccagctactccggaggctgaggcaggaggatcgcttgaacccgggagatgaaggttacagtgttatgaaagaccttggcggagggaaacaaccccaggaagcctcgagtaagtggtcccgaggcagctcatgacagtttggttttattcatttcagggagacaggaattgcagggaaaatcatgacttagtgcttggaaggtgtgagttcctttggccgaaaggcgggacttgtggtaatggggttagaaggcacaggtggttgagggattctgtgggtggcagttggttgagagtgtgaagttttggtctaaaattcagaggtggataaaaaggaacaaactaatggcatttgcagcaacctggatggaattggagactattctaagtgaagtagctcgttaaaatggaaaaccaagcatcacttatgttctcactcataagtgggagctaagctatgaggatgcaaaggcataagaatgatacaatggactgtggggactggggaggatgggaaagggtgggaaggtgggtgtgagggataaaagactacacattgggccgggcatggtggctcacgcctgtaatcccagtactttgggaggctgaggcgggcagatcacctgaggtcaggagttcgagaccagcctggccaatattgggaagccccgtctctactaaaaatacaagtgttagctgggtgtggtggcacgtgcctgtagtcccagttactcgggaggctaagacaggagaactgcatgaacccaggaggcacaggttgcagtgagtcgagatcctgccactgcactccagcctgggcgacagagcgagactccatctcaaaaaccaacaaacaaaaaacccaaaaaccgaaagactacaaattgggttcagtgtatactgctccagtgatgggtgcaccaaaatttcacaaatcaccactaaagaacttactcatgtaaccatataccacctgttccccataaacctatggaaatatgtatatatatgtatttaaatttttagaggcggtaggaaggaatgctgtaggaagaggggctgttatttgtcacatgattccatccctgcccacgaaacaggcctgtgtcaccagattttatgaattctgagacatgaattacccttttccttaagtccctttagatggtgtttgtaatttcatgtcttactgccacagaatctgttttgtgagtctgacgatgtctaatgaacatgaatgtagatcagttgctgtgtatatattctaaaagagagacagtataaggaggctactccgatcttcccgtcacagcggggaactccattttgagagtttttattggtgatcttggccaagagcaggtcagttcacttagttgttggtgggggagctgcttaattttgttaacagcttataggttggaggacaggcttttataatgtgaaaggaaaataaaacctcaggaccccaatttttataccaaaaggaaaatattaagctaaaagctgagtcaagcaagaagttgcctttctttttgttgctaagtgaatagctacagataaaaagttatatatcttggactgggcacagtggcttacgcctgtaatctcagaactctgggaggctgaggcaggcggatcactagatcaggagttcgagaccagcctgaccaaaatggagaaaccctgtctctactaaaaatacaaaacttagccaggcatggtggcctgtgcctgtaatctcagctaatcaggaagctgaggcaggagaatcacttgaacctgggaggcagaagttgcagtgagccacgatcgagtcactgcactccagcctgggtgacagagcgagactgcatctaaaaaaaaaaaaaaaaaaagttatatatctccacaggaaactgtgtatctcaagtaaagtgttgatttactgggtgagacacaaatacctaactgactattctcttgcctgcttctttcctgttgcagtatgtggattacatactaaccctccctcttacctatccagcacacttttcccctttatatattgaagtcctcaaaattgtccttggagaaagtcacagactgttgctgtgattccgtgttgatttcttctgggtctattcttaaccttgggaaaataaacttctaagttgatccagaagcatctccaatatttttggtttacaatatgttgcatgaggagccaaaccatattaaatactagattgtttacagtgatgcagttgccttctttggacttgtcaacttgaagtagttgaaaagatcagattccagttttgaagcatttattcaagtagtaagctgagaatggcctatttgggaaaacacagactccagagaaatggctcagtgctctgaagtcagatgttaaattcttccctatataggcaaaaggcaaagaaattgaacaggattacattttccatagaaggctgatgtatgaggtacaacaatttaatttgttacagtttgctttttttctcctaggcctttattttcttgacagctgattttcatttccttcccaatttaaaagaatgagtttggccaggtgcagtggctcatgcctgtaatcctagcactttgggaggccatggtgggtggattgccttagctcaggagtttgagaccagcctgggcaacacgatgaagccccatctctactaaaatacaaaattagctggctgtggcgacgtgcacctgtaatcccagttacttgggatgttgtgggaaataaaggactagagagactgatacaaggaacgggagaattgttcatttaaggtacgcaccggctcagtggattcacatctaaaaagctgagcactgaacaaagactgagcgaggttttcataagcaaacttacagaagcaaaataaaagtaatcatacagtgataggtcacgtaatctatagcatagcataacttgtggccttgcatagctggtggccttgtagctgcatttaaagaaaaacaagaactgactaaatacagacttctttccttttttttttttccttcaccttcgttctggaggggggatgtctggaacctattcttttggctttgacttctcaaacagcattataactgtctttgaagtgagcttgctaggcagaggaaaacttgttcttttctttttaacctttgccttgcctgttacttttcttggagtgaatgaatgcatatttattttttaaatttctggcttagggaggctaaggtaggagaattgcttgaacccaggaggttgcagtgagccgagatcgtgttattgcactccagcctgggtaacagagcaagagttggtctcaaaaaaaaaaaaaaaaaagagtgagttgaacattccagcttaagacagtgtgatagccatgaagtctttgtgtgagaaagggtaagatgaaagttcatctacaatggagatcaagagtgaagagggaaggggtcttccctggctcccttcaacatttacatgtcaacattgacataattttatgaaacaatatgggtaagaatgaagacaaaaaggcaaatccacagtctgggaaaggaaagttccagctgcctgtcatgtgactcaatgccaccttaatcacattgctttaaggctcaagataatttagagatggaacagctcacatttttggctttagtttcacagactgtacaggtagaaaatgttctggttatgtaatcaggttaattgggggattttggttggttaagcctaaatttcatttccctataaattattattttatcagaattgtatttgagttgtatttcagggtccttaggtaggtcctagggcactacacacagttcagtcttactgtttctcatttatttatttatttattgtttttttgagacagggttttgctcactgcaacatctgcctcctgggctctgggtgcgagcagtcctcccacctcagcctcctgagtagccaggactgcaggcatgcaccatcacacctgacttaattgttgtattttttgtagatgccaggttgtccagtctagtctcaaaatcctgagctcaagtgatccatcagcctctgtgtctcacccaaagtgctgggattacaggcgtgagccacagtgcatcgcctcatttaatttttttttttttttttttttttttttttttgagactgagcctagctctgttgcccaggctggagtacagtggtgtgatctcggctcactgcaacctccgcctcccgagttcaagtgattcttcggcctcagcctctctagtagctgggattacaggcacacaccaccacgccccactagtttttgtatttttaatagagactgggtttcaccatgttggccaggctggtcaagaactcctgacctcaagtgatccaaccacctcggcctcccaaagtgctgggattacaggcgtgagacaccgcgcccggcctatttaaattttttagcactcgccttggggactggtttcccccacattttccaaatagattggatgcagtgtctgctattctccaccctgtgtccgaggctaactcttcaagggcttgcagtagaaatcctaaatgttcagtttctctcccgcgtttccaacatcaactccattctccagttcacaatattatcaactatttcttctttatagtacaacattgtatttattcatcccgtttaaaacagatgcagtgtattttaattgtttattattttatcacagagcaatagatgattctttttaaagtatttgtttgctatttctgaaaatttcacatgagaagaaggcagagaaaaatcaccacacatctcagtgaacaaaacctttgtgcctctccttttatttttcctaggcacagacatcaggatgtctttgggttgaggttcctttttggaaactttacagaatgatctgtcttccgttccccctccaatttttcctggtcctgggtttcagaactgcctaggctgagccaagatacccaccactgccatgtctcttggagggcctagtacatatcagcccctgagtcatacctcccagagcacagcctgaagtagaggagtggggcctcccaagggagtagctgaatgccttgtggtgggaggagactcctggtataatcttcatctagataaccaatccccttggggtgctcagcttttctccctcaaccccagtttccattatttggagatacatggctggtcagccaattggattttgctcctgagaggaaagagaaatgattcctgtcctctggattgtctcagaaatgtaaagaaagaaaacttttttttttttttgcctttcccatgcatactgagggagaaaactcaaaacgtgtgggagaaaacaaaacaaacagaaaaagttggtgcaaaagtaattgaaaagtaattgtgctttttgcattgttgaaatttgctgtttgatattggaatacattcttttttttttttttttttttttttttttttttttttttttttttgagacagagtctcgctctgtcgcccaggctggagtgcagtggtgcaatcttggctgactgcaagctccgcctctcgggttcacaccattctcctgcctcagcctcccgagtagctgggactacaggcgcccaacaccacgcctggctaatttttttgtatttttagtagagatggggtttcactgtgttagccaggatggtcttgatctcctgaccttgtgatccgctgcgtcggcttcccaaagtgctgggattacaggcgtgagccactgcacctagccttcttcttttttttgacagagtcttgctctgttgcccaggggcatgatctctgctcactgcaacctctgcctcccaggttcaagtgattatcatgcttcagcctcctgagtagctgggattacaggcatgcaccatcattgccagctaatttttgtatttttagtagatttggggtttcaccatgttggccaggctggtctccaacacctgacctcaagtgattctcccaccttggcctcccaaagtgctgggattacaagtgtgagccactacacctggcgccaaaaatcttaatgatcttggacttaggaaaaagattctatgacatgacaccaggagccctaggatcagagaacaagtatgtcatttagactacatcagaatttaaaacttttgtgcatctggccaggaatggtggctcacacctgtaatcccagcactttgggatgcataggtgggtggatcatgaggtcaggagttcaagaccagcctggccaacacggtgaaacaccgtctctactacaaatagaaaaattagctgagcgtggtgtcacgcgcctgtaatcccagctactcaggagactgaggcaggagaatcgcttgaacccaggaggtggaggttgtagtgagccaagatcacgccactgcactccagccgcggcaacggagcaagactccgtctaaaaacaaaaacaaaaaacttttgtgcttcaaaaaacaccatcaagaaattgaagcctgtgtggccatgccaccctaaacgcatctgtttggcatagctaagcgggattgggcctggttagtaaatggatggagaatgcctgggaatactgggtgctatatgctttgaaaaaaagaagaagaagagggtggggaatttgacaagagaattccccaaatgagagaaaaccttccatattgaaaatctggtcattccccttcatgacatagggtagaggctgtattggtagccagcactctgaggcatcgtggcccattactgcaggaaatgaactctaccccgcagttctctctggcagtggtgtgcccacagtcccccagtctctcccagtttatggggtgacaacaaagtggtcatccggagagaaatctgaccttgtgtttggatttgtgagtacagacactcttcaggacaccctccttcctccccaaagaaaggaagctttttatcaccaaccattccagtcataggaagcagggtctgaagtctaagtccttattccatgcaaagggagattgcactgaaaacttgttaaaaatgtcaaggaaggcttcattcaacacaattgcaatatgtgtcaggagaactgtaatatgggaaagagattgaactcaatctggaatgcatcaagagaattatagctaaagagtagggtgagggagaggatggaatttggttaggtgtcaagagttgggagactgattaattatcatagatgggggaaatggaacttgattagataccaagtttgagggcattctaagctctaagtctggtcaagaagagggttctgaggagcctgactcaactttggtcaaggaaggagtccttgagattcccccagcctagttcttgctagggctgatgataaatccttaaatttctggtttcctccccacgttccagaacacccatttcttctctctagtggacattatcaactatgtgtccccagtgatacatttgaaactgctgcaatattgtttattttttgacagagcaataagtggctctgtgtaagtttgagacagtctccctctgtcgcccaggctggagtgcagtggtgcaatcttggctcactgcaacctccacctcctgggttcaagctggtatcctgcctcagcctcctgagtagctggattacctatgtatgccaccacactgggctaattttttgtatttttagtagagacagggtttcaccatgctggccaggctggtcttgaactcatgacttcaagtgatccacccgcctcagcctcccaaagtgctggaatttacaggtgtgagccaccgcacctgacctctgtgtaaatttttaaattttgtttataaatatttttcatgagtggaaaacactcaataaccactcaactacattgtgtaaatccttgtgcctaatgactcctgatgtcgaccatctttcgcgtgcttactagccatttgtatgtatcttgcagaagtgttattcagatactttcccatcttttaaggaatcagtatttttttttttttttttttttttttttttttttttttttggtgagacagagatttactcttgttgcccaggctggagtgcaatggcgcgatctcggctcaccgcatcctccgcctcacaggttcaagcgattctcctgcctcagcctcctgaatagctgggattacaggcatgtgtcaccacgtccggctaattttgtatttttagtagagacggggtttcaccgtgttgcccaggctgatctcgaactcctgacctcaggtaatccacccgcctccgcctcccaaagtgctgggattacaggcatgagccactgcgcccggccaggaattagttttttacttggtacaataattcattatagttaagtattgtaagaaatcttaaaatgtaccagctgaaggaattttacatgtacagttaagatagtttgacaaatctacttctctaagatgaataatactgtatttttatttttgtgactggctttttgcgattagtataccattgcttataccatggaacaggatgttattttctaaggctaaataatattccattgtatgtatatgcttaccacattttggttatccgttcagccatcaatggacattgatggattgatccacctcttggctattgtgaatcatggttttcaaatatctcttcaagatccagttttcaatttatttgaattgaataaaaatagacctggaaggccgggcgcaatggctcatgcctgtaatcccagcactttgggaggccgaggcgggcggatcatgagatcaggagatcgagaccatcctggctaacatggtgaaaccctgtctctactaaaaatacaaaaaattagccaggggtggtggcgggtgcctgtagtcccagccacttgggaggctgaggcaggagaatcgcttgaacccgggaggcggagcttgcagtgagtcacagtgagccaagatcgcaccattgcactccagcctgggcgacagaacgagactccgtctcaaaaaaaaggacctggaaatgggttgctggaggataacattttttaaattagcttttgagtaccaccatactgttttccatagaggttgaaccattttacattcctttggacagaacacatgagttccagtttttcaacattctttccaaaactttatatttggggtgtttgaatttttttctttgtagttgagtgtaggagttgattatattttctgaatattaagaccttgccagatgcatgacttgcttatatttgctccaatgtcatggtgataccgacgtgttgggaagggaagagcgtggtccctttaaataatacagaagtgggtaagggaagtgctgggtagaggagggtgtgatccctggctagggctccacccccacagacctaggtgaggacagttatttcctgcccaaatgttgcatttcccaagaccaccctggcccaccatgccccattctgggcctataaaaaccccagaccctagtgggcagacacacaagcagctggttgtcaagaggagcacgccagcagaagagcacactgataggcactggcacaccagcaggccatcagctggcggatgaggcagtccatcaactggcggggctggtgggacaaggcagagtttggctgagccagggccgttgagcagcccagctcccaggaagaccatctcgcttctggctcccctatcacttccactcaataaaactattcactcattctccaagcccacgtgtgatctgattcttctggtacactaaggcaagaacccgggatacagaaagccctctgtccttgcgacaaggtagagggtctcattgagctcattaacacaagctgcctataggcaaactaaaagaccacctgtaacacacgccccccactggggcttcaggagctgtaaacattcaccccttgacactgctgtggggctccactgctgtggggtcggagccccacagcctgcccatctgtatgctcccctagaggtttgagcaacggggcactgtagaagcaagtcacaccccattgcacacctgctaggggaacaagggaaactttcccttttcggtagggtgccttttccctctgtttgtagtgtcgtctcatgggcaaaagttttaaattttgataaacatttgctttttgttaagactgagctccctggaggttttacctctgaaccttgtccccattcagccttcagcagttcatcaattacaatttaagtttttctaccacaatactgtttctcacaaaggtttctgctcttcagtttttgatttagttagttatgactcatcaattaggttggttgagtcccttgcaaaaatcgagttgtggttttttttgttttttctttctgctaattgagtcagaacaaattctccctttcaggtatcctcaatggttaaactttgtgaacaggcattttcaaggaaacacactctcaggactgctaatgttaacatttttctgcatatgaattcagaggactttgttatgacaggcgctgtagacacacactacagacagacattagggacagcccaggcagcgtgcttttctttctggattcactgaaaagacatttcctgttctgctgttggtattgcttagttcagttttagcatcagaatcgctttatggaagaaagtgggtatacaccaagtgataaccaagtcatggaataaatgtctggagtccacagcatcatgggaacttcttaggaatagagtctaggcccccagtgctgtcagtctcacccatcctcctttacatgtgtgagatgttttaggactcagtggtctttgaggatgtagatgtgagcttcacccaggaggagtgggctttgctggatccttcccagaagaatctctacagagatgtgatgcaggaaaccttcgggaacctgtcctctataggtgagggtgacaatattacttccttccttcagcgaattagaaaacatggttttttttgttttttttttttgagacggagtcttgctctgtcgcccaggctggagtgcagtggcgcaatctcggctcactgcaagctccgcctcctgagttcatgtcattctcctgccttagcctcccgagtagcggggactacaggcgcccgccaccgtgcctggctaatttttgtatttttagtagagacagggtttcattgtgttagccaggatggtctcgatctcctgacctcgtgatccgcccccctcggcctcccaaagtgctgggattacaggcgtgagccatcgcacccggccgagaacgtgtttttagctcattaatgctgttccacgatttggaaatatggacagggaatatgtcagtgaataaatgaggcacggatgcagtgtaccatgaacatagaatattatttttattatagctttatactaattaagactattttcctggttctgtattttaggaaataaatggaaagaccagaatattgaagatcactacagaaatctaaggtaatttacacttacaaaatgaagcaatgtctttctagaaaatcttagaatgtgagactatgtttaaaaaaaaaaaaaaaggctgggcgcggtggctcacagcgcattttgggaggctgaggcaggcggatcacaaggtcaggagatcgagaccatcctaacacggtgaaaccccgtctctactaaaaattagcagggcatggtggcacgtgcctgtagtctcagctactcgggaggctgaggcaggagaattgcctgaacctgggagcagaggttgcagtgagccgagatctcgccatcgcactccagcccgggcgacagagtgagactctgtctcacaaaaaaaataagaaaagcaaatgaaggaaataagcccagcatcaaatttgtttatttattagaataataattattttttctttctgagacagagtttcactgttgcccaggctggagtgcagtggcatgatctcggctcactgcaacctctgcttcccagattaaagcaattcttgtgcctcagcctcctgagtggctgggattacaggagggcgctaccacccctggctaatttttgtatttttagtagagacagggtttcatcaccttggccaggctggtcttaaactcctggcctgaagtgatctgcctacctcggcctcccaaagtgctgggattacaggcattagccgccgcgcctggccactttttctttttctttttcttttttttttttttttttgagatggagtcttgctctgtcgctcaggctggagtgcgatggcccaatctcgatctcctgaccctgttgatctgcctgccttggcctcccaaagtgccggattacaggcgtgagccatcgcgcctggctgccacatttatttattcttaacacattttatctaaaatcctatatttcagtgtgacataaactgggcacagtgggtcacacctgtaatccaactatttggaggtagaggtggaaggattgctagaggcctggagtttgagaacagcctgggcaaaacagcaagacttcataacaacaaagaagtagctagacgctgtggcatgtacctgtagttctagctgctcaggaggctgagtcagaatcacttcagcccaggagtttgaggctgctgtaaaccacagtgatgccactacactccagcctgggcaacaggatgacccccattcaagaaaaatgatagaggtttagtatttgtaaagtactctatgggaaaatagtattaagaatttccaggccaggcacagtggctcatgcatgtaatcccagcactttgggaggccaaggtgagtggatcacgaggtcaggagttcgagaccagcctggccagtatggtgaaaccccgtctctactaaaaatgtaaaaattagccgggcatggtggtactcagctgtagtcccagctacttgggaggctgaggcacagcctcaatcttgaacccgggaggcggaggttgcagtgagccgtgcgtgccactgcactccagcctggtcaacagagcgagactttgtattaaaaaaaaaaaaaaaatttctatatagggtcaggcatggtggctcacacctgtaatcccagcactttgggaagcagaggcagttggatcacttgaacctgggaggcgttctggaggtcaggagttcgagaccagcttggccaacatggtgaaaccctgtgtctgctaaaaatacaaaaattagccgggcctcatggcacatgcctgtaatcccagctactctggaggctgaagcaggagaatcgcttgaacctgggaggcggaggttgcagtgagccgagatcacgccactgcttcttgctttaaaagaagagtaaagacaagagtgttggaccagtattgcagttctgtagtatcatttcttataaaaaacaaaacaacaataatttatcaaaattggcatataaagactgacaacattctaataaaggcacaaatttctttttaatacttgtttcaggctctttattctctttataagttaactaatctattttcttcaaacttctgcattagttctttaaaatcacaacacttagcaagctgacttttttaatgtgctcaatacaaatacttgtgaacttttaatatgttgagtgctttcattgtgataactggatctccatttgatattttcatttatataactcatttgcagtctgaaaatttttagtgccagtccctgaatatatcattgaaagttaattttctttgcattttaaaatatctggattatgaagaaaaagtgatgaaaataaattaaaactgaattaccttaaaaaaaaacaaaaaaaaaagaccaagcgtggtggctcatgcttgtaatcccagcactttgggagactgaggcgggcagatcacctgaggtcaggagttccagaccagcctgacccacatggtgaaatcccatctctactaaaaatacaaaagtagccaggcgtggtagcgtgcacctgtaatcccagctacttgggaggctgaggcaggagaattgcttgaccctgggaagtggaggttccagtgagccaagatcatgccactgcgctgtagcctgggcaatgagagtgaaactctgtctcaaaaaaaaaaaaaaaaaaaaaaaaaaaaaagaatgtcactttctgacaggcccaggagcctcaagttatcttgggaccttgacaggaggaaaattcactcaactcatacaggtatttgcaggcatagataagtctgtggctgggcttcaaggctttaaaaagtacaatctgagattccttagtgaacaaagtttcagcaaagccaatttttaaaaagagtttagtctcagaactaggaaattggctaaaaagatatgggacaagatatttaaatttgcctttttctgtctatcccaatctaacaacctctgacccaaatctcttgctgctaatgaccccatgtctgattggttttcagagctgctttttttttttttttttttttatactttaagttttagggtacatgtgcacattgtgcaggttagttacatacatatacatgtgccatgctggtgtgctgcacccactaactcgtcatctagcattaggtatatcccccagtgctatccctcccccctccccccaccccacaacagtccccagagtgtgatgttccccttcctgtgtccatgtgttctcattgttcagttcccacctatgagtgagaatatgcggtgtttggttttttgttcttgtgatagtttactgagaatgatggtttccaatttcatccatgtccctacaaaggacatgaactcatcatttttttatggctgcatagtattccatggtgtatatgtgccacattttcttaatccagtctatcattggtggacatttgggttggttccaagtctttgctattgtgaataatgctgcaataaacatgcatgtgtctttatagcagcatgatttatagtcctttgggtatatacccagtaatgggatggctgggtcaaatggtatttctagttctagatccctgaggaatcgccacactgacttccacaatggttgaactagtttacagtcccaccaacagtgtaaaagtgttcctatttctccacatcctctccagcacctgttgtttcctgactttttaatgattgccattctaactggcgtgagatggtatctcattgtggttttgatttgcatttctctgatggccagtgatggtgagcattttttcatgtgttttttggctgcataaatgtcttcttttgagaagtgtctgttcatgtcctttgcccactttttgatggggttgtttgtttttttcttgtaaatttgtttgagttcattgtagattctggatattagccctttgtcagatgcataggttgcgaaaattttctcccattttgtaggttgcctgttcactctgatggtagtttcttttgctgtgcagaagctcttcagtttaattagatcccatttgtcaattttggcttttgttgccattgcttttggtgttttagacatgaagtccttgcccatgcctatgtcctgaatggtaatgcctaggttttcttctagggtttttatggttttagggcaaacgtttaagtctttaatccatcttgaattgatttttgtataaggtgtaaggaagggatccagtttcagctttctacatatggctagccagttttcccagcaccatttattaaatagggaatcctttccccattgcttgtttttctcaggtttgtcaaagatcagatagttgtagatatgtggcattatttctgagggctctgttctgttccattgatctatatctctgttttggtaactgtagccttgtagtatagtttgaagtcaggtagtgtgatgcctccagctttgttcttttggctcaggattgacttggcggtgcgggctctttttcggttccatatgaactttaaagtagttttttccaattctgtgaagaaaggcattggtagcttgatggggatcgcattgaatctgtaaattaccttgggcagtatggccattttcacgatattgattcttcctacccatgtgcatgtaatgctcttccatttgtttgtatcctcttttatttccttgagcagcggtttgtagttctccttgaagaggtccttcacatcccttgtaagttggattcctaggtattttattctctttgaagcaattgtgaatgggagttcactcatgatttggctctctgtttgtctgttgttggtgtataggaatgcttgtgatttttgcacattgattttgtatcctgagactttgctgaagttgcttatcagcttaaggagattttgggctgagatgatagggttttctaaatatacaatcatgtcatctgcaaacagggacaatttgacttcctcttttcctacttgaataccctttagttctttgtccttcctgattgccctggccagaacttccaacactatgttgaataggagtggtgagagagggcatccctgtcttgtgccagttttcaaagggaatgcttccagtttttgcccattcagtatgatattggctgtgggtttgtcatagatagctcttattattttgaaatatgtcccatcaatacctaatttattgagagtttttagcatgaaaggttgttgaattttgtcaaaggccttttctgcatctattgagataatcatgtggtttttgtctttggctctgtttatatgctggattacatttattgatttgcatatattgaaccagccttgcatcccagggatgaagcccacttgatcatggtggataagctttttgatgtgctgctggattcggtttgccagtattttattgaggatttttgcatcaatgttcatcaaggatattggtctaaaattctcttttttggttgtgtctctgcccagctttggtatcagaatgatgctggcctcataaaatgagttagggaggattccctctttttctattgattggaatagtttcagaaggaatggtaccagttcctccttgtacctctggtagagttcggctgtgaatccatctggtcctggactctttttggttggtaagctattgattattgccacaatttcagagcctgttattggtctattcagagattcaacttcttcctggtttagtcttgggagagtgtatgtgtcaaggaatttatccatttcttctagattttctagtttatttgcgtagaggtgtttgtagtattctctgatggtagtttgtatttctgtgggatcggtggtgatatcccctttatcattttttattgcgtctatttgattcttctctctttttttctttattagtcttgctagcggtctatcaattttgttgatcctttcaaaaaaccagctcctggattcattaattttttgaagggttttttgtgtctctatttctttaagttctgctctgattttagttatttcttgccttctgctagcttttgaatgtgtttgctcttgcttttctagttcttttaattgtgatgttagggtgtcaattttacatctttcctgctttctcttgtgggcatttagtgctataaatttccctctacacactgctttgaatgcgtcccagagattctggtatgttgtgtctttgttcttgttggtttcaaagaacatctttatttctgccttcatttcgttatatacccagtagtcattcaggagcaggttgttcagtttccatgtagttgagcagttttgagtgagattcttaatcctgagttctagtttgattgcactgtggtctgagagatagtttgttataatttctgttcttttacatttgctgaggagagctttacttccaagtatgtggtcaattttggaataggtatggtgtggtgctgaaaaaaatgtatattctgttgatttggggtggtgagttctgtagatgtctattaggtctgcttggtgcagagctgagttcaattcctgggtatccttgttgactttctgtctcattgatctgtctaatgttgacagtggggtgttaaagtctcccattattaatgtgtgggagtctaagtctctttgtaggtcactcaggacttgcttaatgaatctgggtgctcctgtattgggtgcatatatatttaggatagttagctcttcttgttgaattgatccctttaccattatgtaatggccttctttgtctcttttgatctttgttggtttaaagtctgttttatcagagactaggattgcaacccctgcttttttttttttccattttcttggtagatcttcctccatccttttattttgagcctatgtgtgtctctgcacatgagatgggtttcctgaatacagcacactgatgggtcttgactctttatccaatttgccagtctgtgtcttttaattggagcatttagtccatttacatttaaagttaatagtgttatgtgcgaatttgatcctgtcattatgatgttagctggttattttgctcgttagttgatgcagtttcttcctagtctcgatggtctttacattttggcatgattttgcagcggctggtaccggttgttcctttccatgtttagtgcttccttcaggagctcttttacagcaggcctggtggtgacaaaatctctcagcatttgcttgtctgtaaagtattttatttctccttcacttatgaagcttagtttggctggatatgaaattctgggttgaaaattcttttctttaagaatgttgaatattggcccccactctcttctggcttgtagggtttctgccgagagatctgctgttagtctgatgggcttccctttgaggttaacccgacctttctctctggctgcccttgacattttttccttcatttcagctttggtgaatctgacaattatgtgtcttggagttgctcttctcgaggagtatctttgtggctttctctgtatttcctgaatctgaacgttggcctgccttgctagattggggaaattctcctggataatatcctgcagagtgttttccaacttggttccattctccccatcactttcaggtacaccaatcagacgtagatttggtcttttcacatagtcccatatttcttggaggctttgctcgtttctttttattcttttttctctaaactttccttctcggttcatttcattcatttcatcttccattgctgataccctttcttccagttgatcgcatcggctcctgaggcttctgcattcttcacgtagttctcgagccttggttttcagctccatcagctcctttaagcacttctctgtattggttattctagttatacattattctaaatttttttcaaagttttcaacttctttgcctttggtttgaatgtcctcccgtagctcagagtaatttgatcgtctgaagctttcttctctcagctcgtcaaagtcattctccgtccagctttgttccgttgctggtgaggagctgcgttcctttggaggaggagaggcgctctgatttttagagtttccagtttttctgttctgttttttccccatctttgtggttttatctacttttggtctttgatgctggtgatgtacagatgggtttttggtgtggatgtcctttttgtttgttagttttccttctaacagacaggaccctcagctgcaggtctggtggagtaccctgcagtgtgaggtgtcagtgtgcccctgctggagggtgcctcccagttaggctgctcgggggtcaggggtcagggacccacttgagggggcagtctgcctgttctcagatctccagctgcgtactgggagaaccactgctctcttcaaagctgtcagacagggacatttaagtctgcagaggttattgctgtctttttgtttgtctgtgccctgcccccagaggtggagcctacagaggcaggcaggcctccttgagctgtggtgggctccacccagttcgagcttcccggctgctttgtttacctaagcaagcctgggcaatggtgggcgcccctcccccagccttgctgccgccttgcagtttgatctcagactgctgtgctagcaatcagcgagactccatcgggtaggaccctccgagccaggtgcgggatataatctcgtggtgcgccattttttaagcctgtcggaaaagcgcagtattccggtgggagtgacccgattttccaggtgccgtccgtcacccctttctttgattaggaaagggaactccctgaccccttgcgcttcctgagtgaggcaatgcctcgccctgcttcggctcgtgcacggtgcacacacccactgacctgcgcccactgtctggcacttcctagtgagatgaacccggtacctcagatggaaatgcagaaatcacccgtcttctgcgtcgctcacgctgggagctgtagaccagagctgttcctattcggccgtcttggctcctcctcctttttttttaagattgagttttgctcttgttgcccagactggactggagtacagtggcggggtctcagctcactgcaacctctgcctcctgggttcaagtgattctcctgcctcagcttcctgagtagctccaattacaggcacccgccaccacacccagataatattttgtatttttagtagagatggggttttattatgttggctaggctggtctcgaactcctgacctcaggtgatccacccaccttggtctcccaaagtgctgggattacaggcgtgagccaccatgcctggccggttctcagggctttttacctgtatccctcagagcttaagatcaattctacaaaggcttctgaagctaagactttcactctttatcctgggactcattatttaccttatagttcactgttctgtgctaaaactatagtatgctgtttgcataaatattaatactgtactaaaactatagatgagaatactaatgcctttgtcatgcaagccttcgaaccccaacccagcctatgtgagcatgctcagatggctgcaaagtggttccactcacactttggggtaagcacctacccccactacatcccctgtcagcaggaagaagttaaagtggtcttcatcctttttccatccttatagcccacaccttaagaataaggtgttatgaaacccaaagggagagattgaaactacctttacaaaaattataaatgagacagttagtacagtgaaaagagatctgacgtgactccaccttactttttttttttttttttgagacagagtcttactctgtcgccagggctggagtgcagtggtatgatctcagctcactgcaacctctgcctcccaagttcaagagattctcctgcctcagcctcccaagtagctgagaatacaggcacccgccactaagcccagctgattttttgtatttttagtagaggcggggtttcaccatgttggccaggctggtctcgaactcctgacctcgtgatttgcccacctcagcctcccaaagtgctgggattacaggcgtgagccaccacacccggccggctccatcttgcttctaacctccaagctgtccttgttcattcctgggcataggccaaactaaccttgggagggaatttagcttatagtttaactctgaaacgaaattgaagatagcccttccccctccgccccccaaaaaattttgctcttggactgttggcatatttctgaatgctttcaggtcccagtgtaatcccagcactttgcgaggcctagccagaaagatcacgttagctcaggagttccaaaccagtttaggcaacatagggagtcctcatctctacaaaaaaaaaaataataaaattagccaggagtggtggtgaatacctgtagtctcagctactggggaggttgaagtgagaggatcgcttgagcccaggagttggaggctacagtgagccatgatggcatcactgtactccagcctgggcaacagagtgagatctttcccaaacacacaacaaacaaagcataacagttttttatttttttgagacacagtttcactctttttgcccaggctggaatgcagtggcgtgatcttggctcactgcaaccttcacctcctgggttcaagtgattctcctacctcagccgccctagtagctgggattacacgtgcacgccaccacacctggctaatttggtatttttagtagagatggggtttcaccatgttggccaggctggtctcaaacttctgacctcaggtgatccacctgcctcagcctccccacgcactgggattacaggcatgatccaccgtgccttcggggaggccaggatttgaacctttatcttcctggtccttcttgcctagggctcagcagtaaaagcctttctttctagcccatcaaacctcagtgtaaatatctagttttcctgggcaacatgagtggacctcagttctgttctacttttttttttttttttttttttgagcaagacactcagtcacccaggctggagtgaaatgacacaatcacagctcactgcaacctccacctcctgggttcaaggaattcttgtgcctcatcctcctgagtagctgaggctacaggtgtctgccactatgcccagctaattttttttttgtatttttaatagagatggggtttcatcatgttgcccaggctgcctcctgagctcaggcaatccacccaggttggcctctcagtgtgctaagattataggcatgagccaccgcacctgacccacatttctttataatagtgaatttctttataattgtgaattccagtatgctttggcgaaaagggttttttttttttgttttttttttttgagaaggagtcttgctctgtcgcccgggctggagtgcagttgcgtgatcttggctcactacaagctccacctcccaggttcacgcaattctgctgcctcagcctcccaaatagctgggactacaggtgcctgccatcatgcccggctaatttttttgtatttttttttagtagagatggggtttcatcatgttagccagcatggtcttgatctcctgacctcgtgatccacccatctcggcctcccaaagtgttgggattacaggtgtgagccaccgtgcccaccccggtaaagggtcttaaaatgtatcttcccttgctgcagaagctattttgaagtgccatatttttcattaagcattaagtagagaacatcaggataaattagtaggatcatcagtattacatgaaacattagattgctgaatgaattgcataatttaactagaaacactttattctcaagtagaaaagttgtttgctttggagaatttaatcatctgttacttgttcataaatattcccccgaagggctctgacctctccctccagtgtgagcctaattcctaaaactgaataattatttgctgctgcctgtttcacaaacacacatggatgggtcagatgtgtctccttttcctcaaccttatatgaaggaaggagcatctgagcacagcacagaaatgatccaaaccaagctactgtgaagtgtaaagagagcagcatggcttttccaaacaggacagcatcacaaaccctcccaagggtacaaggagagcagttagaacagaaggaaaggtgacccgcagactgttaggactggtgaaaatgattcattgaaaatctaagaaagaactcttgtctttggagccctgtgcccatttctctggagtgtgtcttttcctgaatggccattcccagcttttcacttgaataaactcttcacaactcagtcctacgtttttgcatgatgtgaggttgacgggacacacacccaatacccatggactctatgctccctgccaccaccttcctcttccctcctggcctgcacaaatgtccaggatccaacccttcactctgaatcccccaaactccctgactggacccagtcatgctggatccctcagcagacccatacaacttagaaactctcccctgtcccccaaacctggcttgactctcgtgccctcctcaggcacctttaccctcagcttgaactggcctcagccatgatttgaacttcaccctgtgctccttcatgctccacacctacctccctcaggtgccattgcccccagcagtcctggacctaaggacatcaccatgtctccggcattgcatcctgggagccctcaccttttcccacctctccctggcctttaaagtcattgctgctgtgagacccagaccaccattttgttccagtagccccctgcccacccattctccctctgtgacttctctgcgctgcccagcagatgccattgtatcccagccacggatttctcaactgccattaccaccaactggaagtctttttatttatttatttaatttttataacagagtctcactatgttgcccaggctggtcttgaactcctgggcttaagcagtccccccacctcagcctcctaaagcctggggttatggggtgtctatgcagtgagcccttccatgcacttgaagttgtgaagaacatctaaagactttaccacattggttacatttatagggtttctctccagtgtgagtccttccatgccttcgaaggtttgagggacatccaaaagctttcccacattgcttacatttatacggtttctctccagtgtgagtccttccatgcatttgaagtcgcgaggcacatccaaaagacttcccacactgcttacattcatagggtttctctccagtgtgagtccttccatgcatttgaaggtgtgaggcagatccaaaggctttcccacactgcttacattcataaggtttctctccagtgtgagtccttccatgaatttgaagctgtgaggcagatctgaaggcttttccacattgcttgcattcatagggtttctctccagtgtgagtccttccatgatatcgaaaggagctcgaacagttgaaggatctgccacactgcttgcattcataggtttttcctccagtgtgagtcctttcatgtctatgaaataaactgggcaaactgaatgttttcccataacccttacattcatacggcttctcttctctgtgcatcctttcatgtatttgaaagaaagagaaattactaaatggttttccacattccttacatgcatagggtttctctcccgtgtgagtcctaccatgtgtttgaaggagtgaggcagatctgaaggctttcccacattgcttacactcgtaaggtttctctccagtgtgagttctttcatgatatcggaaggaactggaagaattaaaggctttaccacattggttgcatttatagggtttctctccagtgtgagttttttcatgtgtttgaagtgaactgggagaataaaaggctttcccacatatcttacatttatgagatatctctccagtgtgcattcccaagtggttttgaaagctggtaagataagataatactttcccacaatgtttacattcatagggttttttcctagagtgggttctttcatgtctgcgaacagaactgggacacttgaatgcttttccacattccttacattcatatggcttctcccccgtgtgagttctttcatgtatttgaaaggaatgggaagagctgaaggctttcccacactgtttacattcatatggcttctccccagtgtgagttcttttatgagcatgaaggcatgtggaactatggaatgctttcccacattcattacatttataaggcttctccccagtgtgagttctttcatgtattcgaaggctactagaatgactaaaggctttaccacactgtttacattgatatggtttctctccagtgtgagttcgtttgtggataagatacaaactgagaaacatcaaggctttcccacaaaatttacacttataaggtccatctccacggtgcattatcctgtgtctttgaaggtttgaatgggaaataaatgtttttccgcattcctcacaaacatagagtttccttccactatgagccctttcatgtgtctgaacagaggagagacagttgaaaggttttttacagtatttacatttatatggtttctgtccatattcttgatactcatatgccttgtgtccagtgtcatctctgatgtgcctattaagagatgaatgagcactgcctacttctccatacacactgctttcgcatgattttactccagtagttgttttcttcagcatgtcatctggaacctgggtcaaaatttctccatgctgatgaccttctttactttcaaagagtctctctcccacaattctgtgaacaataagaagtacattataatgggtttgattatcagtgattttatattcattcacaagtattgcacttgcattttttctcttttttttgagatggagtctcactctcttgcccaggctggagtgtagtggtgcgatcttcgcttactgcaacttccacctcctgagttcaagcaattttcctgcctcagcctcataagtagctgggactacaggtgcataccaccacacccagctaattttttgtattttagtagacggggtttcaccatgttggccagactggtcttgaactcctgacctcaggtgatccacctgcctcggcttcccaaaatgctgggattacaggcatgagccactgtgcctggcctgcacttccatttttaacatcatccagcaaactgtaggctttctgccctgtctgaattgtttgaatatgaacggaccacaggctctacaagatggcccagccatatctattatcaaaaaagatgatagaaggcttctgaatactgttttttggttttttttgttttgttttgtttttttgagatggagactcactctgttgcccaggctggaatgcagtggggcaaacttggctcactgcaacctccccctcctgggttcaagcgattctcctgcctcagcctcccaggtagctgggataacaggtgtccaccacgatgcctggctaatttttatatttttagtagagatggggtttcactatgttggccaggctgcttttgaactcctgacctcaagtgacccaccctcctcggccttccaaagtgctgggattacaggcgtgagccaccacgcctggcgtctctgagtactattttaaagtaaactattttacaaatactaaatatctgtctttttaaatttgttttttgggtcagggtctcacactcttgcccaggctggagtgcagtgatgccatcatgacttagtatggccccaacctcctgggctcaagtgatcctccagcctgaacctcccaaagggctgaaatatagtcctgggccattgtgtcaagcctacatcacacttcaatatgtgtttagagaaaattttctaagaataaatagattgaaattgtgcttatttcttttgtttcctttttttttttttaacattttctcccattctaagattttctagagacacacgtctttgtcatgtgagtgcaagttaccttaggtttctccttagattttcgtactctacatatatgttctggggtttccattttttccctacaacacacaacaaggaaaataatcttgaattagtataaaattattaaaaaattacatgattctatgttcatggtacactgcaagcatgcttcctttatttatcaaatattccctgtccacattgtaaatcactcaacagcatacatgagctaaaaatacttgttctcagaaaaaaaaaaaaacttgttgtctcatttactgaaggaagtaatgttgtcacccttacctatagaggccaggttcctgaaggtttcttgcatcacatctctacagagatttttctgggaaggatccagcaaagcccactcctcttgggtgaaggtcacagccacatcctcaaaggccactgaatcctgaaacatctcacatgtatagaggaggatggataagactaacatcactgggaagcctatactctattcccaagaggtttccatgatgctgtggactcaaaacaattattccatgaccatcagacctcatactctctgtctacactcagtttcttccataaagtaattctgaggctacaactgaaccatgtggtaaagcaacagtagaataggaaaatgtgtatttttggtaaatccagaaaggtgtgctgcctgggctgcccctaatgtttgtttgtaaagtgggagtacggcacctgccataacaaagtcttccaaattcctgtgcagaaaaagttaacattagcagtcctgaggctgcatatccttgaaaaaaaaatgcctatcgacaaagtttaacctttgatgttatctagaaaatgaattttgttctgagtgctgcagcagaaacaaaaaccaaaaaactggattttacaaggggtcttatcaatctaaatgatgagtcataaataactaaaacaaaaactcatgagctctacactcatgagctcatgccactgcactgcagcctgggcaacagagtgagactcggtctcaaaaaaataaaattagccaggtatggtggtgcgtgcctgtaatcccagctacccaggaggctgaggcaggagaatcgcgggaatccaagaggcagaggctgcagtgagccaagatcacaccaccacactccagcctgagtgacagagcaagactccatcttaataaaaaaaaaaaaaaaaaaaaaaaaatttccaggcacctagtctcaacaaaaaggcaaacatttatcaaacttttaaaaacttttgtggccaggcatggtggctcatgcctgtaaccccaccactttggaaggctgaggcaggtggatcacctgaggccaggagttggtgaccagcctggccaacatggtgaaacaccgtctctactaaaaatacaaaaataagccaggcatggtggtatgcacctgcaattccactacttgggaggctggggcaggagaatcacttgaacccagaagttggaggttgcagtgagctgagatcatgccactgcactccagcttgggcaacagcaagactccatcacaaaaaaaccacttttgtgcatgagatgacaccatcaacaaagggaaaagggactccttgtgctctgtttaaaggataataaatggctcagcttctatggaaacagtacagtagtgcctaaaaaaataaaattactgtattttcctgtatcccacttttgggtctagttatattaaatttgaaaaaattgaaaactgaaccttgaagacatatttgaaaaccactcttcacaaaatcaaagagccagatcaatccacatgtccattgatggctgcatgcataatgaaaatatgctaggcatatatatacattgaaatattaatcttataacatcctgtctcatgctacaacaatcacaaaacttcaggatactatggtaattgcaaaaagctaggcacaaaaagaaaattacagtataattcaccttagatgagttatgtagtgttgtgcaactatacacttaaaactgcttaagctggtaaaattgaagtttattattttacaataattaaaaataataaatcacagtaccaagtaaaaaaactaattgatattgattaaaagatgggcataggccaggtatggtggctcacacctgtaatcttagcactttgggagtccgaggtgggcggatgacttgaggtcaggggttcaggaccagcctggccaaaatggtgaaaccccatctctactaaaaatacaaaaattagccgggcatgatggcacattcctgtaatcccagctactcaagaggctgaggcaggagaatcacttgaatctgggcagcagaggctgcagtgagccgagattgtgccactgcactccagccagggcaagagagcaagactctgtctcaaaaaaattttaaaaaaaaaaagcaaaagtatttgaatgacatttctgcaatacatagaaatgaccaataagtatatgaagtggtgctcaacatcaggagtcaacaggcataagtattttacacagtgtagtttcaggtggttattgagcactttctctcatgaaaagtattcataaaataataaaattttaaatatagccatttattaaagtaaaaaataataatttaaatactgcagctgtttcaagtgtatcatgagaaacacataattgaagacgtcctttcgagagaggagtgagtgttttggaatgtatcgaggaaagcagaaatttagggatttattgtcattcctaagaagagctggctgagcgcggtggctcacgcctgtaatcccagcactttgggaggcagaggtggccggatcacctggggtcaggagttcgagaccagactgattaacatggtgaaaccctgtctctactaaaaacacaaaaattagctgagtgtagtgatgcgcgctactgggaaggctgaggcaggagaatcgcttgaaccagggaggcggaggttgctgtgagccgacattgcgccattgcactccagcctgggcgacagagcgagactctgtctcaaaaacaaaaatataaaaaaaaaaaaacagcactaagctacaggggtcttaaggactcctgctttactgtttttttttttttctttttttttgagacagagtagtctcactctgccacccgggctggagagcagtagcacaatctcagctcactgcaacctctgcctccaggttcaagcaattctcctgcctcagcttcccaagtagctgggattacaggcacccaccactatacccggctaatttttttgtatttttagtagagacgggggtttcaccatgttggccaagctggtctcaaactcctgacctcgtgattcacccacctcagcctcccaaagtgctgggattacagctgtgagccactgcacctggccaggactccttctttgaccaaacttgatctcacagccctcttcttgtctaggctttggccttcttctgcagagcccagttatagcaaaaagccttttaaggcagtgcacagagaatctctcccaccaaaacttagtatttccaatcaagttcaatttccctcactcatgataatccatcaactttctcttccctaactgctgacacttcaccaagttccatcctttccctcgccttgccctgtaatataggagagagattaaactcagggagacagcctattacgtgtcgtgagaactgtaatataatatacagaactgtaatctccatattatagttctcatgacacatattacaattgtgctgaataaagccttccttgatattttaaacacattttcaatacaatctctctttataagagatagggacttagactggagactctgcttcagaaatctagaatgcataagggataataggctctctccctgtggggagacagctgagactacctcccactcacaaaaccaaaacaccaggtcagatttctctcctgaagaccactccctgctgttatcccataaacttagtaagataggggactgtgggtgcactatttcccagacagggtactagggtagagcttacctcctgcagtgatgatgcaggatgcctggcggtactggctgccaattcaaccgtcacgctgtgatagagacttaggtgttgggaacaggcccccaaatctggccataaactggctccaaaactggccataaacaaaatctctgcagcactgtgacatgttcgtgatggccatgacacccacaatgaagactgttggtttaccggaatgaaggcagggaacacctggcccacccagggtagaaaaccacttaaaggtgttcctaaaccacaaacaatagcgtaagtgatctctgccttaaggacgtgttcctgctgcagataactagccagagcccatccctttgtttcagcccatccctttgtttcccaaaaggaatacttttaatctataatctacagaaacaatgcttatcactggcttgctgtcagtaaatatgtgggtaaatttctgttcgtggctctcagctctgaaggctgtcagccccctgatttgccactccacactccatatttctctgtgtgtgtctttaattcctctagtgcccctgggttagggtctccatgaccgagatggtcttggcaagtggtgtacatgtgtgggtcttgaacccaggtcaaagtgtcaccggagtaacagttggagaatgtggaactaagctggaggacacccgagtactctaaagcaatgcccgtggtaagaaggggagcttggaagcatcagggtaacaaagggacaagtgtgggctctggttccttccatcttgtaaccttttcacactgatgaggaggaggaaggaaagtaacagaagagatgacagagcaggtttgtttgccagctaaagctaaagtggcaaaggaggaagagtccatccctacccttctgcaccccctccttattttgaagaaaaagagtggcctgacccaccagatctttcttttctggaggacactggacaaaaagtagtttccccaatgagtgttcgagcagcaccttgagcaatggctctcagttctattcaggcaggaattcaccaagctacaagagagggtgatatagaggcttggcagttccctgttaggatacaccccccagatcaacaggaaaatactatagctacatttgagccttttccttttaaatttgggaaacaccatgaggggcctgtcccgggccccattccaaaccaaggcatttccggctgaggccattccctaacccttgtacaatatctatcccccaccacagccagtagtgccacggtagatttatgctgcacaaaagctgtgagtcttctgcctggggaacccccacaaaaagttccaacaggggtctgtggacacttgccagtagggacaatcagattacttctaggtagatctagtttaaatttaaaaggagtgcaagtacatacaggagtcactgattcagattacaatgggaaattcaaattgttatagctacttctgttccctggaaagcagagccaggaaagcacaactcctgattgtgccatatgtggaaatggggaaaagtgaaattaaacgaacaggaggatttggaagcacaaataaacaaggcaaagcagcttactgggtgaatcaaagtattgataaatgtcctacctgtgaaataactattcagggaaagaaatttaaaggattggtagatacaggagcagacatttccatcatttctctacaccactggctgtccgcatggccaattcaacccactcaatttaacagagttggagttggtaaagcccctgaagtatatcaaagaatctgtattttgcattgtgaagggcccaatggacaacctgggactattcgatcaattgtaacttctgtacctataaattaatgggggagagattttactgcaacaatggggagtacaagttctaattccagagcaattatatagccctgaaagtcaacatatgatgcatgaaatggggtatgtcctaggaaaaaaattgcagggtttgaaggaactgctccaagcagaaagacaaagttcccaccaaggtttagggtatcatttttgatggtggccattgttaagcctccagaaactatacctttaaaatggttaacagataagccaatttggatagaacaatggccgctaagtaaagaaaaactggaggctttaggggacttagttactgaacaattagaaaaaggacacatagctccaacatttcccccttggaattctccagtcttcgtaattaagaaaacatcaggtaaacggagaatgttaactgacttaagagccattaattcagttatataacctatggggacattacagccaggactgccttctcctgtggattccaaaaaattggcctttaattgtcatagatttaaaagactgtttctttactatccctttagctgagcaagactgtgaacggtttgcatttacaattcctgcaataaacaacctgcagcctgctaagcattttcactggaaagtgttgccataaggcgtgttaaacagtccaacaatttgccagacttatcaattgaaaacattaaatgactttcaaaaagtactaagggatatcaactggatacaacctgctctaggcattcctacctatgctatgagtaatctgttttctatccttagaggagatcctagtctcactaggcaattaacaaaagaagctgaggcagaggtacagctgattgaaaagtaagtccataaagctcagataaatagaatagatccagagaagactctagatttgctaattttttcaactcagcattcacctactggtgttattgtccaagagcaggacttagtagaatggctttttcttccacatactaactcatggactcttaactccttatctggatcaaatcgctactatgataggaaatgggagaactcggattgttaaattacatggatatgatcctggaaaaattattgtccctctcacaaagacacaaatacagcaagcttttataaacagtcttacttggcaaacccattagctgactttgtgggtattctcgataatcattttcctaaaagaaaactatttcaatttttgaaattaactaattggattctccctaaaataactaaatttaaaccaattgaaggtactgaaaatgtcttcacagatgggtctagtaatggtaaagcttcttattccagcttgaaaggtaaagtttttcagaagccctgtacttcggctcaaaaagcaagagcttgtagctgtaagtgaggtattgactgcttttgatatgcctattaatgtgatttctgattctttgtatgtggttcattccacaccattagctgaaaatgctcagttgccatttcatacagatgaacaactgatgactttatttacccaattgcaaacagcagttagaaatagaatacaccctttttacatcactcacactagggctcatacacctcttccaggacctttaactgaagggaatcaaatggctgatggcctagttgctactacaatatctaatgccagacactttcacaatttaacccatgttaatgcctctggtctcaaatgcagatacagcattacctggaaagaagctaaagctattattcagtgatgcccaacttgccaaatggtgcattcctcatcttttataggaggagttaatcctcaaggattggaacctaattctctttggcaaatggatgtcacacatgttccctcgtttgggagactagcttatgtacatgtatgtgtggacaccttttctcagtctgactgggttacatgccaaacaggagagtcttctgcctgtgttaaacgtcaccttttgcagtgttttgcagtgatgggcattccagcttctattaaaacagataatgccccaggctatactagccaagctctagctacatttttctccatatggaatattaaacacattattggcattccatacaattctcaaggatgagccacagtggaaagaatgaatctgtccctgaaacagcagttgcaaaagcaaaaagggggaaacagggactacaggacaccccatatgcaactgaatctagaattattgactttaaattttttgagcctgcctaaaggccagatgctatcagcagctgaacaatatctacagaaaccagctgcaaagacagaagcagaacaactggtttggtggagagatctgataacaaaaagttgggaaataggtaaaataataacttggggtagaggttatgcttgtgtttccccaggatgaaatcaacagccaatctgggtgccattgagacatctaaagccttactatgagccagatacccaggaagaggttttgggaggatcccaaagactccctggttgcagccatgtcaagactgatgctgaggaggaccccaactgtcacgagcaacaactgcctggggacagatcaagaagctgtcacagatggcagagaaaaacctgagaaaagcgggacaaccagtcacaatgagtaatttaatgatagctatgacagtggtgatcaccattgccatgagtattccttcaacaagggctgacacagagaacaattacacttattgggcatatttatcaatcttggctggcaataatgcctggatgtgatcactctatgacacagttacacatgctttctggtctcagtatttaccataataatctgctcctataattgaggcatactgccctcaaaaaactatttgtaaacaggattggacctggtcagaaaaaatgaacgtacttgtttgggaagattgcattgcagaacaggcagaggtgctgcacaacgattcctatggagtcattattgattgttcccctaaggggatgtttagcttgaattgcacctctcagtctgcctgccatggccacactatgttcagctggtctgaacaaaatggtcagatggtagaaatgataagaagtatggcaagagttcctattatctggaaacatggtggtatagtggcacctcaacctcaaatgatatggcctgctgtaggagctaaacataaggatttgtggaaactattaatggctcttaataagatcaaaatttgggaaaggataaaaaagcatctagaaggacactctagaaacttggatattgcaaaattaaaagaacaaatatttaaagcatcccaggcacacctgaccttaatgccaggaactggagtgcttgaaggagctgcagatggattagcagctattaacccattaaaatagataaaaacacttggaggctctgtgatttcaatgatgattgtgcttttaatctgtgttgtctttgtatagtctgcagatgtggatcccaactcctgcgagatgtagctcaccatgataaagccacctttgcttttattgtcttgcaaaaacaaaaagggggaacatgttggggacaggctcccaaatctggccataaacaaaatctctgcagcactgtgacatgttcatgatggctatgatgcccacactgaaggttgttcatttactggaatgagggcaaggaacacctggcccacccagggcggaaaactgcttaaaggtgttcctaacccacaaacaatagtatgagcaatctgggccttaaggacatgttcctgctgcagataactagccagagcccatccctttgtttcacataaggaatatttttagttaatctataatctacagaaacaatgcatatcactggcttgctgtcaataaatgtgggtaaatctcttttcatggctttcagctctgaaggccgtcagccccgatttgccactccacattctattatttctctgagtgtgtctttaattcctctagcaccactgggttagggtctccatgaccaagctggtcttggcacttaggcttcagctgatatagatatatgtcaggaccaggtatagaatttgcatgtctttcttccatttggtgaattctcttgcaatttctgttttttaaggctatagcaaccagtattcccaggaattctacaaaccatgtactaacctggcctgaacctgcttagctgctaagatcaggtgcattcagagtggcatgaccatatactcttttatctttttttgtttttttcaattttgtttttttgagacagggtctcactctgtcacttagtctggagtgcagtggtatgatcatatttcactgtggcttcaatcacctgggctcaagtgatcctcccaccacagcctccccagtacataggactgaagtaccataggaagaactgtgacctaagaaaaaacaagtgggacccatgtagattatctgctcaatgttatggtcaaatgactactgctataaaaaacaaaatccattaatcaagaaagtgaactaccattccatggaaggttcgttactaagtaaaaataaaatatgatataaaatatcacatatctgatatcaactgcataaaaaaatgtaaaaataaaatatactgatagggatgcatacccaggttatgaaactatgaagaaaataagaaaacaataattatcattcgcaatactggctccatcaatattttggttcactgtgaaattgttttatgtgttttgaccatatgtaatatttttagtttctagagtggaaactctgtgcagaaataactatcagtgcacatggaaataccagcaacaacctactgaatataatttttaaaaagacaacatagcctgttaaacaaatttgtattacagttaattttctttttaaaaatgtttttattatttttgttttgtttagggacaggttcttgcactgtcacccatgctatggtgcaggggcatgatgacagctcactgtagccttgacttcccaggctcaagctatccctaccttcctgagtagatgataatacaggctcctgccaccacacatggtgaatttcttaatttttgtgaagacggggtctctttatgttgtccaggttggtctcaaactcccgggctcaagccattctcccaccttggcctccaaaagcaattaattttcttgaagtcccaaaaagtctcagaaaggatataaaattattattatccaaaaagtacccatggaaagatatcaatggaaaatgtaataaatgtaaagatgtcatatgtccttaaacacacactgattatcactgtgatgtaatctctctgaaatacatctagtattttattatattccatgaaatgcataggcaggtttgttttttcattaaaattaagaaaaactacttctaaacactgaaatagaagacaatgactaagaatagccagcataagctgggtgtggtagctcacacctgtaatcccagcactttgggaggtggaggtgggcgcatcacctgaggtcaggagttcaagaccagcctagccaacatggtgaaacccctctctactaaaaatacaaaaattagcctggcatggtggcatgtgcctgtagtcccagctactcgggaggctgaggcagggagaattacttgaacccgggaggcggaagttgcagtgagctgagattgcaccactgcactccagcctcggtgacagagcaagactctgtctcaaaaaaaaaaaaaaaaaaaaaaaaaaaagccaggatgttgtataaaatatgactaagggatgttaatgacataaatgtttgcattttcccactccaaatcatacagtgacaccctaacctgtaatacgatggaattaagatggcatctctgagaagtcattagaattagattagagcatgagagtagatccctcgtgaatgggattagtactcttatgagacacaggatagcttgtttcctctttctctctgtcatgtgaaaaaataaaaaaatagctggccgggcgcggtggctcacacatgtaatcccagcactttgggagcctgaggtgggtggatcacgaggtcaggagtttgagaccagcctggccaagatggtgaaaccctgcctctactaaagaatacaaaaaattagctgggcacggtagcaggcacctgtaatcccagctactcggaaggctgaggcaggagaattgcttgaatcccagaggcagaggttgcagtaagccgagatcgcaccactgcactccagcctgggtgacagagcaagactccatctcaaaaaaaaaaaaaaaaaaaaaaaaatagccatctgcaaaccaggaagcaggctcttaccaggcaccagatctgtcagcaccttgaacatggacttcataacttccaggcttccagaactgtcagaaagaaatgtttatttttttatttttttatttttttgagacggagtctcaccgtcaccaggatggagtgcagtggcatgatctcagcttactgcaacctctgcctcccaggttgaagtgatcctcctacctcagcctcctgagtagctgggactacaggtgcgcatcaccaagcccagctaattttttctatttttagtagagacaggctttcaccatgttggccaggatagtctcgatctcttgacctcgtgatccacctgcctcagcctcccaaagtgctgggattacaggcgtgagccaccatgcccggcctagaaattattctttaagtcacccggtttatgggaatttgatataaaagcccaagatgactaagatagataggcactagccctagaatacatcacagctttgagatctatactaataaagagaaaatgatattaacagagagatggaaatatagaccaatggagagggtccatgggtacaaaaacacagaaaaaatgaataagactaagcatttgcaagcacaacaggttgactatagtaaaaaataatatattgtacattttgaaataactaaaagagctgggcatactggcttatgcctgtaatcccagcacttttggaggtggaggcaggattacttgagctcaggaattcgagacaagcctgagcaacatggtgaaaccccgtctctatgaaaaatacaaaaattagctgggtgtggtggaaaacacctgtagttctagctatttgggaagctgaagcaggaagatcacttgaacctgggaggtgggggttgcagtggtgtggctggctcacgcctgtactcccagcactttgggaggctgaggtgggcagatcacgaggtcaagagattgagaccattctggccaacacggtgaaaccccgtctctactaaaaatacaaaaattagctggatgtggtagtgcgtgcctgtagtcccagctacttgggaggctgaggcaggagatttgcttgaacccaggaggcggaggttgcagtgagcagagattgcgccactgcactccagcttgttgatagagtgagactccatctcaaaaaaaaaaaaaaaacaaaacaaaaaaaaaaacaaagcagctgaccaacattcatgttaaaatagatatcaagccaggcacagtggctcacacctgtaatcccagcactttgggatgccaagaaggggcggatcacttgatgtcaggaattcaagatcagcctagccagcatggcgaaaccccttctcaactaaaaaaaatacaaaaattagctgggcgtggtggcagtcaccagctactcaggaggctaaggcacaagaatcgcttggacccaggaggtggaggttgcagtgagccaagatcgtgccactgcactccagcctaggcaacacagtgagactctgtctaaaaaataaagtaatatcaaaagacaaaacagactctttgtggaaataagacacgaaatcttggcaatacaggaagacctcatccctacaaaaaataactagctgggcagagtggcatgcacctgtgagcccagctactcgggaggctcacgatgattgcttgagcccaggaggtcaaggctgtagtgagctgtgatcacaccagtacactccagcctgggtgacagcaagaccctttaaaaaaaaaaaaaaaaagtcctccatcctgcaaagaactgttttttttttttctttctctttttctttttttttttttgagatggagtttcaccgttgcccagtctggagtgcagtggcgcaatctcggctcaccgcaacctctgcctcccaggttcaaccagttctcctgcctcagcctcccgagtagctgggactacaggcttgtgccaccatgcccggctttttttttgtatttttagtagagacagggtttcaccatgttggccaggatggtctcgatctcctgacttggtgatctgtgcgcctcgacctcccaaagtgttgggattacaggcgtgagccaccacgcctggccagaactgatattttgggtactctttgtaattcaccaatctaccatactttcttgtggaaattatttcatttttctccagttaaaatagtaaactttccctatttttctccagtagcattcctaaaactagtccctataacatcattggaaatcacccacaacaaaaggatacacctgagaaatgtactacactgcccgcagagaagaaaaaaacatattaagaaatggaatataagactaaatagcgattttttttttttttttgagatggagactcgccctgtagtgcaggctggaatacagtggtgcaatgtcagctcactgcagcctccacctcccaggttcaagggattctcgtgcctcagtctccctagtagttgggattataggcatgcaccactatactcagctaacttttgtattcttagttgaaacagggtttcatcatgttggccaggttggtcttgaactcctgacctcaggtgatccacctgccttggcctctcaaagtgctgggattacaggtgtgagccactgcatccagccatttttctgaaatctacctctttctggcctgtgtgtaaaattttcttattttgcaaggtctagtgaaaaatgcaaattacaattaataaaaaacctgaagctgcaataagtgaacaattatttacaaaaagacaaacccacagaggggcaatgctgactagaaagaacacagtgatgtttgactcaagtgtcaggccatcctatcacatgggacatttctctgtgcccatcctgctcactgaagtgctgagtgactattttccaacaacactgcactgtgcccctgtgtgccccaagtgcatttccttttttttttttcccctctcttgagacagagtctcactcacttgcccaggctggagtgcagtggtgcgatgtccgctcattgcagaatccacctcccaggtccaagcaattctcaggcctcagcctctggagtagctgggactacaggtgtgtgccatcacacctggctgatttcttttgtatttctagtagagccaaggtttcaccatattggccaggctggtctcaaactcctggcctcaagtgatctacccacctcaacctcccaaagtgttgggattataggcatgagccactgcacctggccagtgcattttcatttacgaggctgaggcaggagaatggcatgaacccgggaggtggagcttgcagtgagcagagattgtgccactacactccagcctgggcgacagagcgagactccgtctcaaaaaaacaaaaacaaaaaacgggccaggcgcagtgactcacacctgtaatcccagcactttgggaggccaaggcgggtggatcacaaggtcaggagatcaagaccatcctggctaacacagtgaaaccccgtctctactaaaaatacaaaaaattagccaggcgtggtgacgggctcctgtagtcccagctacttgggaggctgagtcaggagaatggcgtgaacccgggaggcggagcttgcagtgagtagagatcgcgccactgcactccagcctgggtgacagaacaagactctgtctccaaaaaaaaacaaaaacaaaaacaaatagttgatactacaaattgaagaaggagagttggtgtctgcaaattttagaaaggaactgaaattttagtattgtactgcaagctctccagaggtaggccagggtcacagggtggagggtttgagatctcacttcccatatatttggaaaatgcagagaagtaccagttaactggggagtgttgaaaattttgaataagaagtaattaaacttaatgcctatagtactctaagatcttggccaagaacatggaaatcaaattcaaatgctattcatataaagtactaacttatgtgacggtatgtggcctgagaaaacaataacaagttactaatttattgggaaatgaaatatgggcttaaccaggtacaattggtcgagtaacctctgattatacaaccaaaaattttccactgtatggtctgtgaaaataagtaattcaaaaattgaagctgttggaactctaaattatcttgaagtttaaagtaatgtgactctggaattgagtcacctgacactggaaagagccagctggaaccctcccacacttgactacagattaaccatcagacaggcttcactatacctggacaggcctcattatacccgcttcctttaggagtttccacatagccactgacccaccttcatgttaaaacagacatcagccaactggaaacacagactctctgtgacaataagaaaccaaattacaaacaagacctaaggccatgcaaggcaagaggtaagtcaaatcttagaattcacaaaatctaaagaaacaggtcttttgttttgggtgggatgaaatcatatgacagataccagaccctcttcacttaagcaatccttcctaccgcctcgaagttttagacaaagcttcacactctccaccaacggccaccttcagaatccctcaaccacctgcaccttctaaccccccttccacaggtcccgccctttctgccaaaggaacttacacctttccaggcattgatgcatgattctccctgcaattcctgtctccctgaaatgaataaaaacagtcttgagccgcctcgggaccacttacttcaggcctcctggggttgtgttttcctcagctgaggcctctcctattcggctctgaataaacttctttaagttattttacacagcttggcattttccgttaacaaattacaagccaggactgggtgtttatcattcaggaatctcaaaggaactctaattattaatatattttttaaaacctattctgagaagcaaaactataattgttaacgtgtctcagtttaatttttaagaggagaaaggcgctactggggaccccacagcccaccctcctcctacacaaacccccacacccgaggcgggatccccccatgaccctcgcgtagtccccgcacaatgtggggagacgcggggcagcgggcgcggagctgcccagagagggctctgggaactgggtgacagtcaccgcgcagggacaggacgagacgcccgggtcccggcggccggcccagccccactgtggggccaaggggaccaagggccgagctgtcccacgggaaatcgggtcccagaccccggagtcgccgcggggaggcccgggtcccaccacagccggttccggccggttccaaccagctcctcccccgcctcgggacccctggcccgcacgctcaccatttcttgcctttcaggtgactcccacgaccagtgcgggtcacagcacaggcgacagaagctatggcagaggcacctgaaccctctcggaggggaaagccaggctcccaacctcagctcgccgcctggagccgggaaccgaggagagcagggccttcgccctccccgatggacactcggcaggccccgcccagcgcccctgattggacgaagcgccgggccccgccccctcagccgtgagtgacaatagaagcccttggtaacggggctctgaaaacgggtttgaccggatccagcgatagattctttaagccagaggtctgtaacctttttagcaccagaaccggtttcgtggaagacagttctcctacgggggcagatagtttcggaatgaaacttccacctcagatcaggcattttatcctcataaggcgaacccaacctagatccctcgcatgtgcagctcacaatagggttcgggctcctatgacagactaatgcctctgctgatctgacaggaagcatatctctggcgataatgcccgctggctcgcccgccagccgctcacctcctgctgtgcggactggttccttacaggccatggaccgggggttggggacccctgccatagagtactgttgaatagaaactttagctcgtccggcggtgggctgggggggtgggggtagctcatgcctgtaaccccaccactttgggaagccaaggcaggcagattgcttgagcctaggaacttaagcccagcctgggtaacatagcaaaaccccgcctctacaaaaaatacaaaaattagtcgggcgtggtggtacatgtttgcagtcccagctactcggaaggctgaaatgagaggatcgcctgagcccagagaggtcgaggccacagtgagctgtgattttaccagcctggatgtcagagtgagaccctgtctccgaaaaaaaaaaaaaaaaaaaagacagggaattgcagtggagtttaatatacatagagccggctaaatgaaagagaagagttttatttttattcaattctgtctccctaaaaaatgggaggctaggttttgtttttttggtttttttttgagacggaatctctctgtcgcccatgctggagtgcagtggcgcaatctcggctcagtgcaacctccgcctcccgggttcaagcgattctcctgcctcaacctcctgagtagctgggattacaggcatgcgccaccatgcccggctaatttttgtatttttagtagagacggggtttaccatgttggtcaggctggtctcaaactcctgacctcatgatccacccgcctcggcctcccaaagtgctgggattacaggcctgagcccccgcacccggccgaggctagggttttaaagataatttggtgagcagaaggctggaaaatggggaatgctgattggtcgcgaaaaggatatcacaggaagtctcagctgtcttcttgcactgagtcagttcttggctaggggccactggagcaggtgagccagtttattggtctgtgtgatgccagcaaatttatcagaatgaagggtctcaaaaatacctcaaacaccaatcttaggtcttacaacaataatattatccacaggagcaagtgagaaggttgggaatcttgtgtactctggccgcatatttcctgaaccataatttctaatcttgtggctaatttcttagttttacaaaggcaatctggttcccaagcaaggagacaatttctttacggaagcggcagttatgacttttgctttaaagctaaactaaactccttccaatattagtaagacctatacccgggaatgaacaagggtagcttggaggctaaagaaaagatggagttcgcttagatctgatctctttcactgtcataattttctcactgttataattcttgcaaaagggttttcagatgtagagtcatacttttagctcctggcaacatttatgttggaactcttatacagcaactaaatcactggaacaggataattggttgaggatttactaactgctccatcaggtggaagtggcactccttactaatttacctgaaagcactatttcctgagccatggagactgagtatagcaatgatatgtgatctaaagaagttcccactctgcttcttctctgcagtgaagtcctgccaggcacgttactacttccactgccactttttcctcctccaaatgtggctaagcaattacttcccttatggaagactgtacaaagatgaaaacatggctaggttgatggggtcactctgagacaaggtagacttatgttatactttttgcaaaggtgacttcagatatggaatcataattttagctgctggcagcaatgatgttggaattcatatacagacactaaatgactggaaaaggacaattggttgaaggtttactaattgttccctcaagaggaagtgccattccctattgatttaattgacagcactatttcctcagccatggaaactgagtacagcaataatatgtgatctaaagaacattccactctgagggccagatgcagtggctcatgcctataatcccaacattttaggaggccaaggcaggcagatcacgtgaggtcaggagttaaagaccagccttgccaacacagtgaaaccccatctctactaaaatcacacaaattagctgggtgtgggctgggtttggtggctcacacctgtaatcccagcactttgggaggtcgaggtgggcagatcatctgaggtcaggaaatcaagaccagcctgaccaacatggagaaactccatctctattaaaaatacaaaattagctgggcatgctggcacatgcctgtaatcccaggtactcgggaggctgaggcatgagaattgcttgaacctgggaggtggaggctgcagtgagctgagatcgcgccactgcactccagcctgggtgacagcgtgagactctatcttcaaaaaaaaaaggctgggcgcggtggctcatgcctgtaatccccacactttgagaggccgaggcgggtggattacctgaggtcaggagttcaagaccagcctggccaacatggtgaaaccccgtctctacttaaaatacaaaaaattagccgggcgtggtggtatgtacctgcaatccctgctactcgggaggctgaggcaggagaattgcttgaacctgggaggcagaggttgcagtgagccgagatcgcaccactgcactccaatctgggggacaagagcgagacttcgtctcaaaaacaaaacaaaaaaaaaaaactttctactctgcttcttccctctggtaatgttctgccaggtacattagtacttccagacactttttcctcctccaaaggtagctaagcaattgttatttccctcatggaaaactaagtataaatgggaatatagctagaccaatgaggtcatgcagaggcaaaggagacttatgttgtttatcaagttttcttttcagtaccttaattttcacttctatttgtttaattttttatttttttggagacagagcctcactctgtcatccaggctggaatgtactagcgtgatctcagctcactgcaacctctacctcccgggttaaagcaatcctcttacctcagcctcctgagtagccgggaccacaggcccgtgccaccatgcctggctaattttagtgttagtttgtagacacaaattctcactatgttgcccaggctggtcttaaactcctgggctccagcaatctgcccactttgacctctcacacagtgctgggattgattacaggcctgagcaaccatgcccggccttcatttctactttttgattattttaaaatttatttatttttctttatttttagagacaagatcttcctacctagtccagactggggaacagtgcagcattaaactaatcctcctgactcagcttcctgacaagcagtgaccatagacacatgccaccacacctggatattttacaaaattaacagtacctaaatatggccgggcagggtggctcactcctgtaatcccagcactttgggaggccgaggcaggtggatcacctgaggtcaggagttcgagaccaacctggacaacatggtgaaacctcgtctctactaaatatacaaaaattatctgggcgtggtggcgggcacctgtaatcctagctactcaggaggctgaggcaggagaatcacttgaacccggaaggcggaggttgcagtgagccaagatcatgccacttcactccagcctgggcaacagagcaaaactatgtcttaaaaaaaaaaaaaaaaaaaaaaaaaaactggccaggcgcggtggctcacgcctgtaatcccagcactttgggaggccaaggctggcaggtcaggaggtcaggagttcgcgaccagcctggccaacatagtgaaaccccgtctctactaaaagtacaaaaaaattagccaggcgtggtggtggggggcctgtaatctcagctacttgggaggttgaggcaggagaattgctttaacccacgagacggaggttgcagtgagatgagattgtgccattgcactccagcctgggtgacagaacgagactctgtctcaaaaaaaaaaaaaaaaaaaaaaactggccaggcgcggtggctcacgcctgtaatcccagcactttgggaggccgaggcgggcagatcacgatgtcgggagatggagaccatcctgactaacacggtgaaaccccgtctctactaaaaatacaaaaaattagtcaggcgtggtggcgggcgcctgtagtcccagctactcgggaggctgaggcaggagaatggcgtgaacccgggaggcggagcttgcagtgagcggagatggcgccactgcactccagcctgggggacagagcaagactccgtctcaaaaaaaaaaaaaaaaaaaaacaggccgggagtggtggctcacgcctgtaatcccagcactttgggaggccaaggcaggcggatcgcaaggtcaacagatcaagaccaccctggccaacatgggaaaaccccgtctctactaaaaatacaaaaattagctaggtgtggtggcgcatgcctgtagtcccaactacttaggaaactgaggcaagagaatcccttgaaccagggagacggaggctgcagtgagccaagatcacgccactgcattccaggctggcgacagagcaagagtccatctcaaaaaaataaataaataaaagtataaaatttagctaaacatgggggcacacgcctgtagtcccagctactcagaaggctgaggcaggagaactgcttgaacccaggaggtggacgttgcagtgagccgagatcacgccactgcactccaacctgggtgacaagagcgagactctgtctcaaaaaaaaaaaaaagaaagaaattccacataccaaactagtcccaggaataaatatgcaatttattaaacaagaaaataacagcctaacacaatagccaaaaaagttaaaatttcagaaatatttgttttcccatgaaaactagatagccagtcatggtggctcatgcctgtaatttcagcacgttgggaggccaaggcagaaggactgtttgaacccaggagttctagagtaccgtggacaacatagggagaccaggtctctacaaaaaattaagaaattagatgggtgtggccgggcgcggtggctcatgcctgtaatcccagcactttgggaggccaaggtgggcagatcgcaaggtgaggagtttgagaccagcctggccaatatggtgaaaccccatctctactaaaaatacaaaattaaccgggcgttgtggcacatgcctgtaatcccagctgagattgtgccactgcactccagcctgggcgacagagcgaggctccgtctcaaaaaaaaaaaaatatatagaaaagaaaagaaattagatgggtgtgggccaggcgcggtggctcacgcctgtaatcccagccttctgggaggccgaggcgggcggatcacaaggtcaggagatcgagaccatcctggctaacacggtgaaaccccttctctactaaaaaatacaaaaaattagccgggtatggtggcgggcgcctgtagtcccagctactcgggaggctgaggcaggagaatggtgtgaacccaggaggtggagcctgcagtgagccgagatcgtgccactgcattccagcactccagcctgggcgacagagcaagactctgtctcaaaaaaaaaaaaaaaaaaaaattagatgggtgtggtggctcacatttgtagtcccagctgttcgggaggctgagatgggaggatcccatgggcctgggagacataggctgcagtgagcagtgatcaagccactgcactccagcctaagtgacagatggagactgtcccaaacaaaacaaactaagcagaaaaactaaggatagcaccttcgaatttgtccctaagttgtcaaagtcttggacccccactgaaggaattccctggtacttagacaccagataaagcagaagtgaagactgcactctaattatcctcctttgttttaggtttcttcctgaaggacttgtgaaaagtcacttcctctacttttttttctgctgacccccaaattttaaacaaagcttttcttccctaaggaattgcaaatcagaaaatctttaaactgtaagccccagctttaaaatatcccaccctttcaagcataaaccaatgagtaatctccatgtattcatttgttattttgcctgtagcatctacattcctaaaacttacccctgcttctaaaaatccctgcctgcaatccagtgggggaggtcaggatttaagactttggctgggcgcagtggctcacgcctataatcccggcactttcggaggctgaggcgggcggatcacaaggtcaggagatcaagaccatcctggctaacatggtgaaaccccatctctactaaaaatacaaaaaaaaaaaaaaagactttatgcctgtgtggtcctccttgattgggactctgcaataaaaggctttttccacatcacttcaaaccccagtgtaaatgcctggctttccagggcaaggcaactggatcacagttctgtcctcaacccctggggctctggttgcaaggctggaaatagacaggctttctcccacatctttctcactttcatgtaggaaagaagtagtttccttctttaaaatcaaaactgttttatcctcaggatatgtacctgcacggacatcataaagttaacttttcagaatatgtttatcagccaggtagagtggcttacagctataatcctagcacttttggaaactaaggtgggaggattgctcatgactaggtgttcacaaccagcctgagcaatggaatgagaacctgtctctatgaaaggaatgaaaaatgagctaagaatggtgatacctgtctgtagtcatagctactcagaaggctaaggcaagaggatcatttgagcccaagagttcaaggctgcagggaactgtgattgcaccactgcacttcaacctgggtgacagagggacaccctgtctcccaaaacacacacacacacacacacacacacacaaatacatatatacatctatgtatgtatgtaaatatcctatatattttccttatgcattttaaatatagttatatgttaaaatatacatgcatatttatatacaaaatataaatatgtatatttcatcttatttatttatttatttatttatttttgagatggagtttcactcttgttgcccaggctggagtgcaatggcacaatctcggcttactgcaacctctgcctcccgggttcaagcgattctcctgcctcagcctcccaagtagctgggattacaggtgcctgccaccacacctggctaattttgtatttttagtagagatggggtttctctatgtcgatcaggctggtctcgaactcccaacctcaggtgatctccctgcctccacctcccaaagtgctgggattacaggcatgagccactgtgcctggcctattttattttattatgtaatagagataacgtctcaccatattgcccaagctggtctcaacctcttcagcttaagcaatcctcctgccttggcttcccaaaatgctgagattacaggtgtctctgcagtgaatccttccgtgcatttgaagttctgagtcccatctaaggactttaccatattgcttacatccatagagtttctagccagcgtgagtccttacatgcttttgaaggattgaggcagatctaaaggctttaccacattgcttacactcatagggtttctctccagtatgaatcctttcatggtagagaaaagagttggaagaaatgaaggctttcccacactgtttacatttatagggtttctctccagtgtgagtccttttatgatagcgaatagaattagaagaaatgaaggcttttccacattgcttacactcatagggtttctctcctgtgtgagtcctttcatgcattttaagttgtgaggcaactctaaagactttaccacattgcttacatccatagggtttctctcctgtgtgagttcgtatgtgcttttgaaggactgaggcagatctgaaggctttcccacattgcttacactcatagggtttctctccagtgtgagtcctttcatgatagtgaaaggaattggaagaagtgaaggttttcccacattgtttacattcaaagggtttctctccagtgtgtgtcctttcatgtattcgaagatccttgacaaaactgaaggctttcacacattttttacattcataaggtttctctccagtgtgagtcttttcatgatagcgaaaggaagtggaagaaataaatcccttaccacatagcttacactcatagggtttctctccagtgtgttttctttcatgtactcgcaggtacttgacagatctgaaggctttcctacattgtgtacactcatagggtttctctccactgtgagtcctttcatgatattgaaaggaactgggacaattgaaggctttatcacattgcttgcatttatagcgtttctctccagtgtgacttttctcgtgtctttttaacgaactgggagaaaaaaaggctttcccacatatgttacatttatgaggtctctctccagtgtgcattctcatgtgtgtctgaaagcttacaagataagataatgctttcccacactgcttacattcatagggtttttttgcagagtggattctttcatgtctacgaacagaactgggaaaactgaatgctttcccacactgcttacattcatagggtttttttgcagagtggattctttcatgtctacgaacagaactgggaaacctgaatgctttcccacattccttacattcataaggcttttccccagtgtgagttcttccatgtattgcaaggctactggaataactaaaggctctgaggtgcctattaagggatgaaagacctatgccgatttctccacacacactgctttcatatgattgtactccaggagttttcttcttcagtgtgtcatctggaacctgtgtcaaaacttctccatgctgatgactttctttactttcagagagtctctcccctataagtcttctgtgaacaatgaaagcacattataatgggtttatcactaattttaattcctttgcaagtattacacttgcatttttaacagtgcccagcaaagtgtaggctttctgtcctgtctgaacatgaatggaacacatgctatacaagatggcctagccaggccaggcatggtggctcacgcctgtaatcccagcactttgggaggccgaggagggtggatcatgaggtcaggagatcgagaccatcctggctaacatggtgaaaccctgtctctactaaaaaatacaaaaaattagccgggcgtggtggcaggtgcctgcagtcccagctacggggaggctgaggcaggagaatagtgtgaacccgggaggcagagcttacagtgagccgagatcacaccgctgcactccagcctgggtgacagagcgagacactgtctcaaacaaacaaacaaagatggcccagccatatctcttatcaaaaaagataatattgatacagggattttaaatgctttatttatttatttatttatttatgagaccaagtctcactctgtcgtcaggctggagtgcagtggcaccatcctggctcactgcaacctccgcctcccaggttcaagcgattctcctgcctcagcctcccaaggactacaggcacgcaccaccacgcccagctaatttctcgtatttttagtagagacaggctttcaccatgttggccaggatggtctcaatctcttgacctcatgatccacccacctcagccttccaaagtgctgggattacaggtgtgagccaccatgtccagcttttacatgctattttaaagtagactattttataaatacggtctttgtctttttgtctgtttagttttgagtcagggtctcaccctgtggcccaggctgccctccagtgatgccatcatgactcagtgcaacctcaaactcccaggttcaagcgatcttccatcctgacctccaaaagggctggattatacacataagccatgtcacactttatatgtttctagggaagcttttctaagaataaatacattggaactaggtttgtttcttatgcttgcttctttttaaccttttcttccattctaagattgtatacagagacattgttttctcttttaagtgccagttaccttaggtttctcctaggattttggtgctcatcttcaatgtactggttgttccatttttttcctaaaatgcggacccagaaaaatagtcctgaattagtataaaattattttaaaaagttacttgattctatgtccatggctcattgcacctgtgtctcatttattcaaagtattccctgaccatattccaaatcactcaacagcactgatgagctagaaacacctgttctttaattcactgagggaagtaatactgtcattcttacctatggaggtcaggttcctcaaggtttcctgcatcacttccctgtagagatttttctgggaaggatccagcaaagcccactcctcctgggtgaagttcacagccacatcctcaaaggccaccgaatcctgaaatatcccacatgtggacaggaggatgagtgaggctgacagcactgggtttctataccctattcctaggaagttctcaggatgctgtggtgtgtggactccaaacatttattccatgacttggtcatcagatcccttactctgtctacactcactttcttccataaaacaattttgatgctagagttgaactctggatggggtaaagcaacagcagaataggaaaaatgtgtgtttctggtgagtccagggagaaagtcgtgctgcctggactgcccttaatgtccgaagtgtggatctgcagcacctatcttaacaaactcctttgaatttctgagcaaaacaaatttaacgtgagcagccctaagcctgcatattcttgaaaacgcctgttcacaaagttgaacctttgtgatgactagaaagtgggttttcttctgattccagtagcagaagccaaaaacaaaaaaactgggtttggcaaggggctttattaatctaactgataagagagtctggccaggcacggtggctcatgcctataaatctcagcactttgggaggtgaaggcgggcggatcgcctgaggtcaggagtttgagaccaacctggccaacatggcaaaaccccgtctctactaaaaataataaaattagccaggcatagtgatgggctcctgtaattccagctacttgggagactgaagcaggagaatcacttgaacccatgaggcagaggttgcagtgagccaaaaacgtgccaccacactccagcctgggtgacagagccagactccatcggttaaaaaaaaaaaaaaattctaattgataagagagtcataactaactaaaacaaaaactcacaaaaagaaacctttctgggaaactgtatgtagatagaaaaacctaaactgggctggacacagtggctcatgcctataattccagcactttgggaggccaaggcgggcagatcacctgatgtcagcagttcaagaccagcatgatcaatatgatgaaaccctgtctctactaatagataatcccaagtgttggtaaaccacaaaaataaagacacacacatgaaaggctagatggttgatccatacatacactctactggcattatctttcaaattggaatttatccataatatacaacccagtgacttttcccccaatatgtgagaaatttatgttccattttcatatggcaaagaaaaccaaccatgacattgtcaccaaggtcaaaaactaaactgtaaacccaaatcccattaagcagtgaaatgcataagtaaactgggcaacccatgactcaacacagtggcatgtttgcaacagaatgaggcaaaaagtcagaaacaaacccttttggtataacatgaaaggtacattaattgcaatactaagttactggaaactccaaacagccaaaattctactttgtgataaaagaaaatatggcaggcctgggctgggcgcggtggctcatgcctgtaatcccagcactttgggaggccgaggcgggtggatcacgaggtcaggagattgagaccatcctggctaacaccgtgaaaccgcatctctactaaaaatacataaaactagccggtcttggtggcgggcgcctatagtcccagctactcgggaggctgaggtaggagaatggcatgaacccgggaggcggagcttgcagtgagccaagatcgagccactgcactccagcctgggcgactgaacgagactccatctcaaaaaaagaaaaaaaaaaaagaaaaaatatggcaggcctggcacagtggctcacacctgtaatcccagcactttaggaggcaggcacagatggatcacctgagctcaggagttcgagaccagcctggccaaccaggtgaaaccacgtctctactaaaaatacgaatatcagctgggcatggtggcaggcgcttgtaatcccagctacttggggggccgaggcagcagaatcacttgaacctaggaggtagagattacaatgagccaagatcgtgcattgcactccagcttgggcaacagagcaagactctgtctcaaaaaaaaaaaaaaagaaaagaaaaagaaaagaaaagaaagaaaggctgggcgcggtgcctcagcactttgggaaactgaggtgggcagatcacaaagtcaggagtttgagaccagcctggccaatatagtgaaactccatctctactaaaaatataaaaattagctgggtgtggtggtatgcacctgtagtcccagctactcgggaagctaaggcaggagaatcgcttgaacccaggaggcagatgttgcagtgagccgagatcacgccactgcactccagcctgggcgagaggcagctccgtctcaaaaaaaaaaaaaaaaagataatacagctacaaagaataacaaaaagaaggctgggtgcggtggctcatgtctgtaattccagcactttgggaggtggatcacctgaggtcaggagttcaagaccagctcagccaaagtggtgaaaccccatctctactaaaaatacaaaaattagccaggtgtggtggcaggtgcctgtaatcccagctacttgggaggctgaggaaggagaatcgcttggacccaggagatagaagttgtagtgagcagagatggtgtcactgcactccagcctgagcgacagagcgagactccctctcaaaaaaaaaaaaaaaaaaaaagaataacaggccgggcacagtggctcacacctgtaatcccaacactttgggaagccaaggcgggtggagcatgaggtcaggagttcaagaccagcttggccaacctagtgaaaccccatctctactaaaaatacaaaaattagccaggtgtggtggcgcatgcctgtaatcccagctactcgggaggctgaggcaggagaatcacttgaacctgggaggtggaggttgcagtgagctgaactcacgccattgtactccagcttgggcaacaagagcgaaactccatctcaaaaaaaaaaagaataaccaaaagaatcaaaattttgaccacctttgtgtgccatagttagatgacatcaaagaaacacaccagaactgcccaaggactattcattttcctgggtggtgttcccaagtatattcttactgacatggcatccaattttaaaacatccaattttggccgggtgcggtggctcatgcctgtaatcccagcactgtgggaggccaaagcaggcagatcacctgagatcaggagtttgagaccagcctggccaacatggtgaaaccctgtctctactaaaaatacaaaaattagccaggtatggtggcatgcacctgtagtcccagctacttgggaggctgaagcaggagaatcgattgaacccgggaggtggagtttgcagtgagccaagattatgccagtgcactccagcctgggcgacagaaagagactccgtctcaaaagtaaataaataaataaataagaagcaattaaactgaactggctatagaacactaagacccttcacaagcatactgaagccaaattcaaatccaattcacataaatttctaatctgtggcctgaggaaacaatatcactaatgactaatttatagggaaatgaaatttaggcttaaccaggcacaataggtcaattaatctctgattacataaccaaaagtttcacctgtacagaatgtgaaaataggtgattcaaaaatttaagctgctggaactctaaattatcttgaggtttaaaggaatgccattctggggttgagacacctcacaggcagcggtaacagagccagccagggaaccttccattccctgattacagattagctttctttcttacctatattgttttgtaaaatattttaaatgacaagcaagtcaggaaagaccccttccctcttaaggattgatttcattatagactaacttccctcttacttttcttacacaaagacttcatggccatcacatcttctgaagctggaaatgttaaattcacttttttaaataagaaaagaaatgaaaaccggccgcgcgcggtggctcacgcctgtaatcccagcactttggaaggccgaggtgggtggatcacgaggtcaggagatcgagaccatcctggctaacacggtgaaaccccgtctctactaaaaaatacaaaaaaattagccgggcgcggtggcgggcgcctgtagtcccagctacttgggaggctgaggcaggacaatggcgtgaacccgggaggcggagcttgcagtgagcagagatcgcgccactgcactccagcctgggtgacagagtgagactccgtctcaaaaaaaaaaaaaaaaaaaaaaagaaaagaaaagaaattaaaaccccttgcaaagaaaattttaaagtcctgggccgggcgcggtggctcacgcctgtaatctgatacaggagaatcgcttgaaccggggaggcggaggttgcagtgagccgagattgcgccattgcactccagtctcggcaacaagagcgaaactccgtctcaaacaaacaaacaaaaaaacctgtaactaaattgtataattaatttagttgtactaattagttgtattaaattaattgtacaattaatttagttgtactaattgttgcgataattaaatttctttgttttttgcctatataagaaggagcttaactttttttttttgagacagtctcattctttcaccatggctggagtgcagtggggcattccactgtaatcccagcactttgggaggccgaggagggtggatcacgaggtcaggagttcgagaccagcctggccaatatcatgaaaccccgtctctactaaaaatacaaaaattggccgggcgcagtggctcacgcctgtaatcccagtaccttgggaggccgaagtgggcggatcacaaagtcaggaggagttcaagaccagcctggccaatatggtgaaacccgtttctactaaaaatacaaaaattagccgggcgtggtggctggcgcctgtagtcccagctactcgggaggctgaggcaagagaatcgcttgaacccgggaggcggaggttgcagtgagccgagatggcgccacagcacttcagcctggggcgacggagcgagactccgtctcaaaaatataaaaatctggtaaaataaaaacaggtcttttggggaagggggcggggactgggatggaataacgtggcagataacagccctccttcctacagcctccaaattttagacaaagctttacacactctcaaccaactgccacctacagaatccctccaccacctgtgccttctaaccccgcttccatgtgtcccgcctttcggccaaaggaacttacaccttcccggcactgattcatcattttcctgcaattcctgtctccctgaaatgaataaaaccaaactgtcaggagctgcctcgggattgcttactccagacttcgcggggttgtgtttccctcagccgaggtctctcctattcggctcagaataaacttattctacacgatttgggtttttccgttaccaaaccacaagccaggactgggagtttctcattcattaatcgctgtttgctaaaataaactctcattttttaacagtgcctcagtttaatttttaactggaaaaaaaaaggaactggggaccccacagcccacagctcctcccacacgaaccccacacccgaggcaggatcccccatgacccttccatggtcaccgcacaatctggggagacgcggggctgcgggcgcggagctgctcagagagggagccggggccggggccgcagtcgccgcgcagggaccggacaggacgcccggggtcccggctgccggcccagctccacccagcggccgaggggaccgagggccgagctgcgctagggggactgtgtctggagcccagagtcgctgcaggggggcccgggccccgccacagcgggttcctctcggttccacccagtccctcctttcgccttgggactccccagcaccgcatgctcaccatttcctggcttccaggtattctggcgtcctctctaaaggtcccgtgaacagtgcaggtcacagcgcagtcgacagagcaacagcagctacggcggaagtaactggtccctctcggagcaagaaagccccagaccttaactagcgcgagcagccctaggagtgaagagagcgggaatgcaacctccccttccctggaggacagtggcagggccccgccctagcgcccctgattggataggggtctagactccgcccccttccctgagtgacagcagaagccccgggtaactgggcgctgcagagccgaagcgactggttctggccacactttccaaggtcagctccctccctccctcccacctttacttcgaatatttgccttcggccaaacttgctccgaactgctagaagggacactgttgtcttcctcactccgtgggccgtccctgccccttcatcctacacgggacacaagtgtgcagggaattccagattcagtgtccacaaaatgtgaaagacattaaaatattttgccccaagatattgccctgccaaaatatatttctttgacagttttgaaatggctgctgcttggccagcaaacaaaaggtggccttgcaaaactgtcttttgagggggaaatttacatttgtagagaatctccgttaatgaagcactgccagctcccccgttcttttcctttccctgatctaaaagctattgagagtttgacacctttaaaatctgaagagaggtagcacatggtgactcatgtctataatcccaccacattggcaaactgaggcggaaggatcccttgaagcaaggagtttgaggccaacatcatcaacacagcgagatccctgtctttctttcttttttttttttttttttagacagtctcgatctgtcgcccaggctggagcacagtggcacgagatcttggctcactgcaacctccgcctcccaggttcaagcgattctcctgccccagcctcccaaatagctgggattacagacatgcgccaccacgccccgctaattttgtatttttagtagagacggggtttctccatgttggtcaggctggtctcgaactcacgacctcaggtgatccgcccgcctcggcctcctaaagtgctgggattacaggcgtgagccacctcgcccgccgatccctgtctttattatttaaaatttttttaaatggccgggcgctggccgggcgcagtggctcacgcctgtaatcccagcactttgggagaccgaggtgggcggatcacgaggtcaggagatcgagaccatcctggctaatacggtgaaaccccgtctctactaaaaatacaaaaaaaaaattagccgggcgtggtggtgggcgcctgtagtcccagctactcgggaggctgaggcaggagaatggcgagaacacgggaggtggagcttgtagtgagcagagatcgcaccactgtactccagcctgggccacagagcaagactgtgtctcaaaaaaacaaaacaaaacaaaacaaaaaaccagtggccgggcgcagtgagaccaggtctctaccaaaaagataagtaaatagattagggccaggcatggtggctcatgcctgtaatcccagcactttgggaggccgaggtgggtggatcacttgaggtcaggagtttgagaccagcctggccaacttgacgaaatcccatctctaccaaaaatataaaaatgagctgggtttggtggcacacacctgtgatcccagctattcggggggctgaagcaggacaattgcttgaacccagaagacggaggttgtagtgagcagagattgcaccattacactcgagcctaggtgacagagtgagaccttgtctcataaaaaggaaaaaagtctattctctgggggagacatcatctacgtaacagtccacctctagccaagcctcttcctttctcagtctactaagctgtcttgctactaaacctaatttactgacctcaggtcgctatataatcttctctgtcttatagctgggtgtgtcttcattctgaaggttcccatgtatacatgttaaatacatttgcatgccttcttttctattaatcaatctgcctcagatcaattagttttcagcaaacctttaggacacgaagagtctatcacccccacaaagccatccccttgtctcagggcaggaggggaacaaggccatgtatgactgctccaggagggagagacagatctcctgcagtggggcaagaatcgggatgaggcatggccaaggtttcctcacatacacccatcttctcctcacagtgtggaaactccccctcctctccacaccttcattttcattagcgggaaactctcacctggagtcagtttaatcttattaccagaaaggggtaccaatccagaccccaaaagagagttcttggacctcatgtaagaacaaattcagggtgagtccataaagtaaaagcaagtttattacagaagtaaagaaacaaaagaatggctactccatagacagagcagcagcatggtctgcctgacaatgtatacttatagttatttcttgattatgtgctaaacaaggggtggattattcatgagtgttctgggaaaggggcaggcaattcccagaactgagggttcctacctcttgttataccacatagggtaacgtctggatattgccatggtatttgtaaactgccatggcgcttgtgggagtgtttgttagcatgttaatgctttataattagtgtataataagtagtgaggaccacataaggtcactttcttttcttttctttttttttttgagacagagtctcactccctcgcccaggctggagtgcagcagcgcaatcatagctcgctgcagcctctctgccttcctgcagcccctgcctcccaggctcaagcaatcctcccagctcagcctcctgagtagctgagactacagccacaggccaccacaatcagctaatttttgtattttttgtagagatggggtatcactgtgttgcccagggtggcagaggtcactttcgtcgccaacttggttttggtgggctttggctggtttcttcagcgcattctgttttatcagtggggtctttatgacctgtatcttgtgataccagtcctgccgacctcctagctcatcctgtgactaagaacgcctaatcacctgggaatgcagcccagtaggtctcacccttattttacccagcccctattcaagatggtttcactctgcttcaaacacccctgacattatgacttaaataaagtcaactttataaaccctttgttcataacacaacccaaacaatttgttctctgaggctgaccttcacagatttgcttcatatatatcaattacagtctgtccccagcgaccctgtgcatgccaaaaccaaaacactgcccagaaaatagctccaggcctgaaggtacctctgaaaggtacaaccccagataggacagaacccccgagcgcatctgcacgtgggtcttctgccatccagggctctgcagcttcccagaatccacactccttctggagctggaggccaccttcaagggagggcgggctccgggggaagcccccaggagtttgcaaaaggagccccctttccctccttttgcaaactccagactagcctcagcggggagtcattggcctccggctctgctgccccctacaggttattaagccgcttcttaccccattgatcagttcctagaaacaaacaccctcaatcccagtgtgtgaataagacgccagcagagtctctgctttcctcctgtggtgcttttttttattttgttttgtttgtttgtttgtgacggagtctcgctctgtcgcccaggctggagtgcagtggcgcgatctcggctcactgcaagctcctcctcccgggttcaggccattctcctgcctcagtctcctgagtagctgggactacacaggcgcccgccaccacgcgcggctaattttttttttttttttttttggagactgagtttcactcttgttgcccaggccggagtgcagtggcgcgatctcggctcactacaagctccgcctcccgggttctcgccattctcctgccgcagcctcccgagtaactgggactacaggtgccggccaccgcgcccggctaattttttgtatttttagtagagacggggtttcactgtgttagccaggatgctctcgatctcctgacctcgtgatccgcccgcgtcggcctcccaaagtgttggaattacaggcgtgagccaccgcgcccggcctcctcctgtgcgttatgtatgacataaggaaaaacaggctgggtgcggtggctcatgcctgtaatcccagcactttgggaggccaaggcgggcagatcatgaggtcaggagttcgagaccagcagcctggccaacatagtgaaacctcgtctcttctaaaaatacaaaaaattagccaggcgtggtggcaggcgcctgtagtcccagctacttggggggctgaggaaggagaatcgcttgaacccgggagggagaggttgtggtgagccgagatcgcgccactgcactccagcctgggcaacaagagtgaaactcagtctcaaaaaaaaaaaaaaaaaaaaattagccaggcgaatagcttgaacctgagaggtggaggttgcagtgagccgagatggcaccactgcactccatcctgggcgacagaacgagactccatcagaaagaaaagaaaggaaggaaaaaaagaagggaagggaaagggacaggaggggacgataggggaggggaggcggtcgggagggatgtgcagcccaggaggagaaggaagggggccagggaggcttagtcagtgggcggtgggtgtgtgggtgtgtgtcctgtcagcttcacattgtccaaaggatcagaattcagttgtgagtttatgaaagtgaaaagcagggaatggcctttctggaaaacacatacttcaaagaaatgggctcagttctttcttactcagattttgaacaactcattttcacaaccccaaaccctctgcaggtcacatttcctcctctcattttggtcttggcctgaaccctacctgctctccttgcacccttgttcccagcaaaccgaggattgggctgcttattctctgtgcccaataatgagatgcagatgaactgggaaagaagagttgcttgctttatttattttttttatttttttgaaatggaggcttgctctgtctcccaggctggagtgcagtggcgcgatcttggctcactgaacctccacctctctggttcaagcgattcttgtgcctcactcagcctctcgagtaactgagattacaggcatgcaccaccacgcctggctaatttttgtatttttagtagagacggggtttcaccatgctggcctccaactcctggcctcaagtgatgtgcccgcctgggcagcccaaagtgctgggattacaggcgtgagccaccgtgcctggcctaggtttttaacggtattcctaaggaaacacaaatcatggcatgagtgtgtcctctctagaaaaagaattaaatacaatggttgaagtaagagtagaaactccaccttggagtcttctcccttaatgtgacacaaacatcataggtgagtcttccagacacgattccgccacaactttttttttttgaggcagagttttgcttttgttgtccatgctggagtgcaatggcacgatttccactcaccgcaacctctgcctcctgggttcaagcgattctcctgcctcagcctcccaagtatctgggattacaggcatgcaccaccatgcccagctaatttttgtatttttagtagagacagggtttctcgatgttggtcaggctggtcttgaactcccgacctcaggtgatctgcctgccttggcctcccaaagtgctaagattacaggcgtgagccactgcacccggcctcccccacaacttattacaggctgccaaagagtcaggcaaaacagtgctggcatcctctttttctctgaaaaatgtgtgctatccctccccttggcctctcgcccaccctactccccgtctttgctttcttcctgtcccctcattgtgtccagccagtgccattgtgtccagaccgtgggttcctcagtggccattgcctccaccaccatgatatggaaattttttcttaattaatagagatgtgggctcactattttgcccaggcatttcttgaactcctgggttcaagtgatcctctggcctcagcctcccaaaccgatagaattatgggcgcaagccaccatgcccagcctagaagtcttttaatgcatttacattttcttagaattttccttctttactttacatacacacacaggaggaaagcagggactctgttggtttcttgggttttttgtttgtttgtttgtttgtttgtttgtttgtttgagacagagtcttgctcagtcgcccaggctggagtgcagtggcgcaatctcggctcactgcaagttccagcttccgggttcacgccattctcccgcctcagcctcccgagtagctgggactacaggcacacaccaccacacctggattttttttgtatttttagtagagacagggtttcaccgtgttagccaggtcgatcttctgaccttgtgatccgcccgcctcggcctcccaaagagctgggattgagcactttgccaggtgtgagccactgcgcccggccggtttcttgtttttaaaagatgaggttgaagatctttttgtctgatcatggaggtgaaatgcaggtgaataacctgcagggggcagcagagtctgaggccggtgactccacgctgaggccagcctggagcctacaaagggaagaaaacggagctcccctgagggcttcccaggcagccctccctccccagcaggtggcatccagctgcgcagagcagctgcagaacggctgtggattctgagaaggtgcagaggcctgaaaagctggaaaccttagtgcagatcccctgggggttctgtcctttctgggtttgcctgtctggagcctggggccattttccggacaatgctttggttttgatatgtgtagggtcactagggtcaatagtgtaatttgtatatatgaagaaaatgcgtccaggcaccctggctcttgtctctaatcccaacactttgggagggcgaggtgggtgattaggttgagcaccggagttcaagaccagcctgggcaatatggtgagaccccatcactacaaaaaatacaaaaattagctggttgtggtggtgaatgcatgtatccccagctactcaggaggctgaggtgggaggaacgattgagccctggaggctgcagtgagctgtgatcgcaccaccacacttaagcctaggtgacagtgagactctgtctccaaaaaaaatgtgtggtaagtcaggctcagagacagaattgtttgggatgttgagaaagagttaatgaagttgacagtttattcaggtcacaaacttaaactcaccgcaggtgagagtttcctgacagtgaaaataaagttctggaaggagagagcattttcacactgtgacgaggaatgtggatgtgagaaggccttggccttgcctcattccaaattatcttgacctgcagaacatctgtctctccctcctgatgtagtcttgcctggcctcatctgggctcctctcctactctgaggcaaggggatagctttgatggagcgataggctcttgacccccaaaacatttgctaaaatatcgttgacataaagctgattaatatgagaaaggcatatgaatttatttaccatgtatacagggctgcctttagtaagaagacccacccaacaataagatagaaaagcttatataccatcttgaggctgttactaagggaggagaccacccgtcatattgtcgtatgcccaatttctgcctccaaagaaagaagaagtaaaaactaaaaggcagaaatgaaatccacaagcagacagcccggcgcctcaccctgggcctggtagttaaagatggacccctgacctaatcagttatgttatctatagagtacgcacattgtatagaaaagcactgtgaaaatccctgtcctgttctgttccggtctaattaccggtgtatgtagcccccagtcacgtaccccctgcttgctgaatcgatcacgaccctctcaagtagacccccttagagttgtgagcccttaaaagagacaggaattgctcactcagggagctcggctcttgagacaggagtcttgccgatgctccctgcccagtaaaacgcgtccttctttaactccgtgtctgaggggttttgtctgcggtttgtcctgctacattaccagaaaggggtcctaattcagactccgggagagagttcttggttctcatgaaagaactcagggtgagtccttagagtaaagtgaaagcaagtttattagagaagtaaaatctcaggccaggagcggtggctcatgcctgtaatcctagcactttgggaggctgaggctgccagatcacctgaggtcaggagttcaaaactagcctgggcaacacggtgaaaccctgtctgtactaaaaatacaaaaaaaattagccaggcatggctgcatgtgcctgtagtcccagctactcgggaggctggggcagtgaggtggaggttgcagtgagctgagattgcaccaccacaatccagcctgggcaatagagggatactccatctccaataaaaaaaaatgaattgggtttaacattaataaaatatcagtaataattataatttttatgtgaaattactgtgtgtcacagaaatgaccagaccttaataatggatgttcttcgccgggtgcagtggctcaaagtgctgtaatcccagcactttgggaggaagaagtgggtggatcacgacgtcagggattcaagaccagcctggccaacatggtgaaaccctgtctgtactaaaaatacaaaaaattagctgggtgtagtggtacatacctgtaatcccagctactcaggaggctgtggcaggagaattgcttgaacccaggaggcagaggagatctagaccatcctggctaacacggtgaaaccccctctctactaaaaatacaaaaaaaaaattagccgggcgtggtggcaggcgcctgtagtcccagctactcgggaggctgaggcaggagaatggcgtgaacccaggaggcggagcttgcagtgagctaaaatcgcaccactggactccagcctgggtgacagagcgagactccgtctcaaaaaaataaaaataaaaataaaaacccgggtggacaagaaacaaaaaataaaaagaattttaaaactgtaaaactgttgttgagtactaatgtgctcataactattgagcagaacagaagtttatgacatagactgaactaagggaagactaaaataatctttttatagctttttgtttaaaatattgctaattcttttgtttttcaaagtccagaaaaacttttttttttttttttttgagatggaatctcactttgtcacccaggctggagtgcagtcactcaatctcagcatctcgctcactgcaacctccacctcccaggttcaagtaattctcctgcctcagcctccagagtagctgggattacaggcacccgccaccaggcctggctaatttctgtattttttagtagagactgggtttcgccatgttggccagctggtcttgagctcctgaccttaggtgatctgcccgccttggcctcccaaagtgctgggattacaggcgtgagccaccgtgcctggccataggtatcactttctttacggcccagaacaaatagccctcctaaacaaataatgtacataactcacaaatttcttgcttaccatcaaaaaccttgatttatcaaacatttcaggtgacaaaacaatgcaagttcccaagttgcattctataaaatctctagcaaacctttgtttctttgcagccggctcccttctgctggttctgcctgttgccttcttgcaaggtactttcatattttccttaataaatctgcctttttttttttttttttttttttttttacctacaactgtcttggtaaatccctttttttttttttttttttttttgagatggagtcttgctctgttgcccaggctggagtgcagtggcacaatctcgactcactgcagcctttgcctcccgattctccagcgattctcctgcctcagcctcctgggtagttgggattacaggcgcccaccaccaagcccggctaatttttgtatttttagtagagatggggtttcgccacattggccaggctggtttcaaactcctgacctcaggtgatccgcccgcctcggtctcccaaagtgctgggattacaggtgtgagccacatcgcccggccagtcttgataaattcttttacccttgcgccactggcccagatagtagccactcacccacaacatagatgaagactcccacagagagaatggatgcaaaatgcttcttttaagaatttctggccgggcacggttgctcacgcctgtaatcccagcactttgggaggccgagacgggcggatcacgaggtcaggagatcgagaccatcgtggctaacacggtgaaaccccgtctctactaaaagcacaaaaaattagccaggcatggtggcaggcgcctgtggtcccagctactcgggaggctgagacaggagaatggcgtgaacccgggaggcggagcttgcggtgagccgagatcgcgtcactcactccagcctgggcaacagagcaagacaccatctcaaaaaaaaaaaaaaaaaaaagcaaaaccagaatttcttacttattttgttttttggtctcactctgttgcccaggctggagtgtactggtgcaatcacagctcactgcagccctcgactcctgggccaaagtgattctcctgccctggcctcctaaagtgctggtattacaggccccagccaccttgcctggcctctttccagactttttttgtttttgttttttttgagacggagtttcattcttgttgcccaggctggagtccagtggcatgatctcggctcactgcaacctccgcctcccagcttcaagtgattctcctgcctcagcctcccacatagctaggattacaggcgtccgccaccacgactggctaatattttgtattttagtagagatgtggtttcaccatgttggccaggctggtctcgaactcccgaccacaggtgatatacccgcctcggcctcccaaagtgctgaaattacaggcgtgagccgccgcgcccggctttccagacttttaaaagtgtcagactctcaatttctcccggatcagggaaagggaaaaggggagagggggcatggcttcactaatggaaatactccatagacgcaaatttcaccccccagaagacagttgtgcaagggcaaagctgcagccattcgaaattgccaaataaatatattttggaataaaatattttaattgctttcacctctattaaacatagagtctggaactccctgcacacacttatgacactgtgcaggacgaagaagcagggacagaccattgacagagccacttctagtaattaagacgagcaagtttggccgaaatgcaaattttcaaagagcagggcgtagagagggaacttgaccttggactgtggcttgaagcggtcagtcctgctctgcttggccctgttacccaggacttctgctgtcactcaggatgcagggggcggggcctggcgctccacccaatcagagtcgccggggtggggcccggccaactgtttatccgcgggtcacattgccgttcgcctcagtctttggcccctcccgccgggtgaggttggcaccccgtttttcctgctctgagagggaccggttgccaccgccatacttctgtcgccctgtcgtctgtgttgtgactgctttggacgtgggagtcacctgaaagccaggaaatggtgagtgtgagcccccgctgggagtcccgagacttgggggagggtaggcggaggctggttggaactggctggaaccggctgtgccgggacccggacctccccgcggcgactcgaggtctggggcccgagccccgctggcgcagctcggccttcggtccattcggccgccgggtgcggctgggccggcagccgggacccctgggcgccctgtctcgtcgccgcgcggcgactgcggccccagcccgggagccctctctggacagctccgcgcccgcagcccggagcctctccatattgtgcggggccacgggagggtcatgggggcaatcccgccttgggtgtggggctcgtgcgggaggagctgcgctgtgaggccctcagtgccccctttctcctgttaaaacttaaacaggcccggtgctgggaatagaggcgtgagccaccgcgcctggcctagcgtggagaacttgtgacagcggataaatgttttccctgctgtctgtggcttagagcttggcaactgctgtcgtgtttttgttcacatcatgatcaatgtgtactagatgctttgttgttgtaatcgcctgaggggttcttcctgcctgtgctgcaaaaagaaagaccagggcattgcagtaaagaaaatgtttgacacgagatggaccacgcaacgccgaagacggagacagagttagcactcaaatcagtctccccgaaggcttatagttagggatttttctttaatatttttttcttacaatttttttttttttttttaagacagagtctcgctcttttttgcccaggctggagtgcaatgacacgatctgggctcagtgcaacctctgcctcccggattcaagcgattcttctgctcagcttccctagtagctggggttacaggcacgccaccacgccctgctgatttctgtattttcagtaaagacggggtttcaccgtgttggccaaggtggtcttgaactcctgacctcaggtgatccgcccgcatcggcctcctaaagggctaggattacaggcgtgagccacctggcccggctaaaaattgttttttaaacaaggtctcactctgtcgcccaggttggagtgcatggcgcgatcacggctcactgcatcctggacccacctgagcagcagctcaggtgattgtgctgcctcaccctcccgagtagctgggactacaggcgcaggcggctaatttttgtatttttggtagagatggggtttcgccatgttgcccaggctggtcttgaactcctgggctcaagcgatctgctcacctcggccccccaaagtgctgggtttacaggtgtgagccaccgaactcggccaggggtttttcaaaggcagaatcggggaagaggtggtgggaaatggtcctcctgagtgctgagttgcttatagaggagcagggttggtgggcctgagtggagccatgggtgtcagacaagcaaaaaacctgaaaacacttatctgcagaagtatcttgggaccagtctataccatagcaaaattcaggctcctcatcgctccccactctgttccccccgccccgactcatggtttttcattagctttaggaaggcagtgtttaaggaagagctattatcatttaaactataacataaatgtcttcttttttttttttttttttttttttgttgttgttgttgacggaggctccctctgtcgcccagactggagtgcagtgacgcgatctcggctcactgcaagctctgcctcccgggttcacgccattctcctgcctcagcctccggagtagctgggactacaggcgcctgccaccaagcccggctaattttttgtgtttttagtagagacggggtttcaacgtgttagccaggatggtctggatttcctgacctcatgatccgcccacctcggcctcccaaagtgctgggattacaggcgtgagccacctcgcccggccaaatgtcttctaaagttagctcagcctaagcctaggagtaattaaggcagcttgaaaggtaaagacaagagaagcagttggctagatctctttgactgccataattttttcagtgttacagtttttgcaaaagtggtttcattatcatggaaatagtaataaaataatattgtcaacttaaaaataatgagatttccataaaaaattagctgggtgtggtggtacgctcctgtagtcccagctactccggaggctgaggcaggagaatcacttgaacccgggaggtggagtttgcagtgagctgagatcgcgccactgcactccagcttgggctacagagtgagactccctctcaagtaaaataataataataatgagatttccctggaggccagtcagtcaaggctgcaccgaaccgtgatcacaccactgcactccagtctgggtgacagagtgagaccctgtctcaaaaataagaaaattaggccgggtgcagtggcttacgcctgtaatcccagcgctttgggaggccgggtcgggcaatcacctgagaagttcgagaccaggctggctaacatggtgaaaccccgtctctactaaaaatataaaaattagccaggtgtgatggtggtgcatctataatcccagctactggggaggctgaggcaggggaattgcttgcacctgggaggcggaggttgcagtgagctgagaccacgccattgcactatagcttgggcaacaagagtgaaactctgtctcaaaaaaaaaaaaaaaaaaaaaaaaaaaggccgggcgcggtggctcacgcctgtaatcccagcactttgggaggccgaggtgggtggatcacgaggtcaggagattgagaccagcctggcacacacagtggaactccgtctctactaaaaatacaaaaaattagccgggcgtggtagtgggcacctgtagtcccagctatcagagaggctgaggcaggagacgtgaacccaggaggtggagcttgcagtgagccgagatcgcgccactgcactccagcctgggccacagagcgagactctgtctcaaaaaaaagaaagaaagaaagaaagaaagaaagaaggaaagaaggaaagaaggaaggaaggaaggaaggaaggaaagaaaattaaaaattaatttaaaaatagccaggcatagtgcctcacacctacatcctagcactttaggaggccaaggtgggtgggcgaggggttgtgggatcctttgagctcaggagtttgagaccagtctgggtaacatggtagaacctcatcttaacaaactgcttaaaaaatagccaggcatgatggtatgtgtctgtagtacccagccacttgggaggctgaagtgggaggatggcttgagctgagaggtggaggctgcagtgaggcatgatcatgccactggacttcagcctgggcgacagagcaagaaactgtctcaaaaaataaaaatagagattcaaaaaatatggttaaaggctgggtgcggtggctcacgcctgtaaacccagcaccttgggaggctgaggcgggcagatcatgaggtcaggagttcgagaccagcctgaccaacatggtgaaaccccgtctctattaaaaaaatatatacaaaaattagccgggcatggtggtgggcgcttgtaatcccagctactcaggaggctgaggcaggagaattgcttgaaaccagaaggcggaggttgtagtgagccaagatcgtgccactgcactccagcctgggcaacaagagtgaaactccgtctcaaaaaaaataaaaaataaaataatttaaagttctaatggcttcaggttggaattattgacttccacaaatgtgtgtattgtctgaaatgattagatacttttgctttccattttgtggtacgaaatgcaaatgccttataatttcctttccatgtgtaaacctgaacctgagtttgagggattttgctagattcttcaaacactgggtattttctcattgaatcagacctgagcccagtgactgcaagctaaggtcaatcagaagcctgcaaagaggtcattgaaggctcacttgtttcttgctggggagcctctcctgcagtgtcccagctgctcacactgacccagctgctcacactgaccatgggaggagccctttattctgagagaatctcagagccctggaaaactgaggatccacaggcagatgcagcgggtcagcgatgcctttctgaggctagttgtcctaaggttgtttctaaacatttttaatgaaacagatgtggatttaggtaaggaatgacttttctttttattcttttattcctttttttttttttttttttttgagaccaagtcttgctctgtcacccaggctggaatgcagtggtgtgatctcggctcactgcaacctctgcctcctgggttcaagcaattctcctgtctcagcctcctgagtagctgggattacaggcgcccagcaccatgcccggctaattttttgtattgttagtagagatagggtttcaccatgttggtcaggctggtctcaaactcctgacctcaggtgatccacccaccttggcctcccaaagtgctggaattaacaggggtgagccatcgcgcccagccaggaatgactttattctaaaggagaattgaaataaggaaaagggagaaagtataagatctgtaagcatctcaaagttagcccaaaaaggaattttttttttttttacagagaggagaaaacaaggttaggaagaaggtgagagtgggaggtcaggatacaatttcattcgttaataatttgtattttaggccaggtgcggtggctcacacctataatcctagcactttgggaggccgaggtgggtggatcacctgaggtcaggaatttgatactagcctgaccaacatggtgaaaccccgtctctactaaaaatacaaaaattagccaggcgtggtggcacgtgcctgtagtcccagctactcaggaggctgaggtaggagaatcgcttgaacccaggaggcggaggttgcggagagccaagtttgcgccaactgcactgtagcctggacaacagtgagactccgtctcaaaaaaaaaaaaaaaaaaagaggccgggcgcggtggctcatgcctgtaatcccagctcgcagggaggcaagaggcgggaggatagcttgagcccaggagttcgagacctgcctgggcaatataatgagaccccgttctccacaaaaaggaaaaaaaaaaaaagacaaaaataaaaataagcgtaaaaaaaaaaaaaaaagaaactgaagcatgtgtggtcatgccacgctgaacacatctattctctgtagctaagcagggttgggcctggttagtaaatgtatagaaaatgcctaggaatactggctgttttatgcttaaaaacaaaaaaagaaaggatttcacaagataattcaccaaatggaagaaaaacttctatattgaatatctggtccatcttcttcttcacataggatgggggatgaattggtagccagcactctgaggcatcctggcccattactgcaggaggtgaactctaccctgtagtcctctctggcagtggtgcaaccacagtctccaatctcatcctgtttatagggtgacaacaagaagtggtcatcaggagagaaatctgacctggtgttttggatgtttgagtaggaggtactcccaagaaatccatcttcctccccaccagaagagaacttcttatcactaatgcattgcagacatatgaattagggtctcaagtctaagtctttattccttgtaaagagagattacactgaaaacttggtaaaaatttcaaggaaggttttattcagcacaattgcaatatgtgttgaataaagccttattttttgcctatatgttataggacaatttaatatgggaaagaaattgaactcaacctgaatgcatcaacaagacaattatatctaaagagcaaggtaccgtagaggatggaacttggtgaggtgtcaagagttggggaagagaatattaataaattatcatagatgagggaaacaacttgattagatatcaagttggggggcattctctctaaactctcttattaggatttagctataactgggctctgcaggacaaacacaaaagctagtcaggaagtgggctccgaggagcctcactgaagtatgatcaaggaaggagtccttgagatcctcccagcctagttcttgctagggctgatgataaatccttaagtttctggtttcctccccacgttccagaacactccctcatttcccctttccactggacatcattatcaatcatgtgtcccccatgatacatgtgaaactgctgcagtattttaattgcttaccatttttttccacaaagcaataagtggtgggtatattcaacccattttccatgtgccccgagaatactcttgtctctaatcctaatgtaacatcatatacgtttttgttatattaggattagaaacaagttctgtttagaaattttattttcacattgaaagtcaatcagatttgcttcagctttaaagagtatgcttgtgtaaaattcaatgaatgctggcagcaagctgcacttttttttctaaatgggaaatgggttaaaaatgtattactttatgaatactgttcatgagaggaaagcactcaataaccactaaaaactacattatataaatccttgtgcctgatgactcctggtccactgacgttttcatgagcttcttggcccttttcatatatcttgcaggaatgtcattcagatactttccctatctttcaatcaattaggttttttttttttttttacttggtacaataatttattattgtaaaaaaattaacatttattagctttaggaattttacatgtactgttgagttagtttgtcaaatctatataactcgtctaagatgaataatactgtatttttgtgactggccttttgcaatcagtatagaatcctgaattttttttcttttttttttttttgtttgtttgagatggagtctcactctctcacacagcctggagtgcagtggcatgatcttggctcactgcaacctctgcctcctgggttcaagctgttctctgcctcagcctcccaagtagctgggattccaggcatccaccaccatgcccagctaatttttgtatttttagtagagatggggtttcaccatctaggccaggctggtcttgaactcctgacctcgtgatccactctgcctcggcctcccaaagtgctgggattacgggcatgagccactgcatccagctgaatcctgaattttcatgctttttgtagcatgggacagaaagttattttgtaagactaaatactatcccattgtaagtacatgcataccacgttttctttatccatttagccatcagtggacatttggattgatccatctcttggctattgtgaacagtggttttcaaatatttcttcaaagatccaactttcaatttatatgaattgaatataaatagacccagaaatgggttgctggaagaaaattttttttttttttgctagtttttcaggcaccaccatactgttttccataaagattgagccattttgcaatcctttggtcagagcacatgggttccaatttctcaacgttttttccaaactttatatttgaggtggtttgatttttcttttttctttttctttttttttgagataaagtctcagtgttgttgcccaggctgaagtgcaatggcgcgatctacgctcactgcaacctccgcctcccagcttcaagcaattctctggccccagcctcctgagtagctaggattacaggcacccaccaccatgcctggctaattttttgtatttttagtagagacagggtttcaccatgttgaccaggctggtcttgagctcctgacctcaggtgatccacccacctcggcctcccaaagtgctgggattacaggcatgagccaccgcgcctggccttgatttttcttttctttttagttgaatgtaagaattcattatattttctgaatattgagacttttccagatatatgactttccaatatttgctccagcatcatggggtgccttttccatctgtttatggtgtcccctcatagacagaacttttaaattttgataaatatttgcctttttgttaagagtgggtgcactggagtttttatccctgaactttgtctccattcagccttcagcatttcatcaattacaatttaagttttcctaccacagtctgctttttttttttgagacagagtttcgcttttgttgcccaggctggagtgcaatggtgcgatctcagctcaccgcaacctccgcctgccaggttaaagcaattctcctgcctcagcctcccgagtacctgggattacaggcatacaccaccacgcccagctaattttgtatttttagtagagacagggtttctccatgttgaggctggtctcgaactcctgatctcaagcgatccgcacgcctcagccttccaaagtcctgggattacaggtgtgagccaccgcgcccggcccacagtactgtttttcacaaaatttctattcatgagttttttatttagatagttctgcctctcttatcagttgggttggttgaaccccttgcaaaatccagttttttttttttgcttttgttgtctgctgcttcaatcagaataaaatcccccttccaggtaatcttcaatggttaaactttgtgaacaggcattttcaaggatatatagcctcaggactgctaatgttaacattttctgcaggtgaatttagaggactgtgttatgacaggtgctatagacccatgctacaaacagacattaagagcagcccaggcagcgcacctttctccctggattccatgaaaagacacatttttctattctgctgttcgtttattgcttagttctgttccagcatcagaattgctttagagaagaaagtaagtgtagacagagagtaatgggtcagatgaccaagaaatagaataaatgtttggagtccacagcatcatgggaacttcttaggaagagggtatagacccccagtgctgtcagtctcacccatcctcctctatacatgtgggatgtttcaggacttggtggctttcgaggatgtggctgtgaacttcacccaggaggagtggtctttgctggatccttcccagaagaatctctacagagaagtgatgcaggaaaccttgaggaatctggcctccataggtaagaatgacagtattacgtcccccagtgaatgagacaagtgtttctagctcattaatgctattccttgatttggaatatggacaggcaatactttgatgaataaatgaggtatggctctaatgtcccgtgaacatagaatctaatcattttttcataattttattttaattcaggattctttttctgattctgtattttaggagaaaaatggaaagaccagaacattgaagatcagtacaaaaatcccaggaataatctaaggtgatttaaactcacgagacaaagcaatgtctctctagaaaatctcagaatgcgagaatatgttaagaagaagcaaataaaggaaatatgcctagcattaaatttatttactcttaaaatattcactctaaaaacctacatttaaatgtgatctaggctgggcacagtggctcacacctgtaatttcaactgtttgggagttggaggtgggaggattgctagaggcctggagtttgagaagagcctgagcaaaatggcgagacttcatctcaaacaaagaactagctatacattgtggcatatacctgtagtcctagctacatcgaaggctgaggcaggaagatcacttgagtccaggagttcaagggtgctgtgaaccatgatgatgccactgcactccagcctgggctatatggtgaccctgactcaagaaaatgatatagaagtttagtatttgtaaaatagtctacatggaaatattatgaagaattctcatatggtgtttttcttttttaaacatatgatttttaaaaataatacgtatagataggccatcttatagccatatggtccagtcaccttccaacaatttagacagggtagaaagcctacactttcctggataatgttgaaagtgcaagttcagtggggagggatagcattaggagatatacctaatgctaaatgacgagttaatgggtgcagcacaccaaatgggacatgtatacatatgtaacaaacctgcacgttgtgcacatgtaccctaaaacttaaagtatattaataataaaataaaataaaataaaataaaatgcaagtgtaatccttgttaataaacatcaaatcacttataaacaaaccttcaataatgtgtttctcatttttcacagaagtcttctgggagagagagttgatgaaaatacagaagaaaatcattgtggagaaacttctagccagattccagatgacacactgaacaaaaaaacttctcctggagtaaaatcatgtgaaagcagtgtgtgtggagaagtcttcgtgggtcattcttcccttaataggcacattagagctgacactgcacacaagccgtctgagtatcaggaatatggacaggagccatataagtgtcaacaacgtaagaaagccttcagatgtcacccctcctttcaaatgcaagaaaaggctcacactggagaaaaactctatgattgtaaagaatgtggaaaaaccttcatatcccattcaagcattcaaagacacatgataatgcacaatggagatggaacttataaatgtaagttttgtgggaaagcctgcccttgtctcagcatatatcttatacatgaacgagttcacactggagagaaaccatataaatgtaaacaatgtggtaaagcctttagttattcaacttcccttcaaatacatgaaagaactcacactggagagaagccttatgaatgtaaggaatgtgggaaagcattcggtagtcccaattccctttatgaacatagaagaactcacactggagagaagccatatgaatgcaaacaatgtggaaaagccttcagatggttccattcctttcaaatacatgaaagaactcacagtgaggagaaggcttatgaatgtaccaaatgtgggaaagcattcaagtgtcccagttatctttgtagacatgaagtgacccactctgggaaaaagccctgtgaatgtaaacaatgtgggaaagcattatcttatcttaactttcaaagacacatgaaaatgcacactagaatgagaccttataaatgtaagactgtggaaaagcctttgattctcccagttcgttttgaagacatgaaagaactcacactggagagaaaccttatgaatgcaagcactgtggtaaagccttcaatcgttccagttcctttcactatcatgaaaggactcacactggagagaaaccctatgaatgtaagcagtgtagtaaagccttcatttcttccacttcctttcgatatcatgaaaggactcacactggagagaaaccgtatgagtgtaagcaatgtgggaaagccttcagatctgcctcacaccttcaaatgcatggaaggactcacactcaagagaaaccctatgaatgtaagcagtgtggtaaagccttcattttttccacttcctttcgatatcatgaaaggactcacactggagagaaaccctatgagtgtaagcaatgtgggaaagccttcacatctgcctcacaccttcaaatgcatgaaaggactcacactggaaagcaactgtatgaatctaaacaatgtgaaaaaacctttggatctgtcagaaaccttcaaattcatgaaaagacacaccctggagagaaaccctataaggaatatggaaaagcattcaacaatttctcttcctttcaaatacatgcaacaatgcacagaggacagaatgcctatgaatgtaaagagtgtgacaaagcattcatatctgccaagatccttcgagtacatgcaagaacacaccctggagagaaaccctatgaatgtaaggaatgcggaaaagcgttcaattatttttcttctttgcgtatacacaaaaggatgcacactggagagaaaccatattaatgtaaggattgtgggaaagcattcagtttgcctggttcctttcgtagacataaaagggctcacactggagtgaaaccgtatgaatgcaaggaatgtggcaaagccttcacttcttctggttcctttcagtgtcataaaaggattcacactggagagaaaccctatgagtgtaagcagtgtggtaaagccttcatttcttccactgccattcgtagacatgaaaggactcacactggagagaaaccctatgagtgtaagcaatgtggaaaagcctttatttctttcagttccattcagtaccatgaaaggactcacactggagagaaacagtatgagtgtaagcagtgtggtaaagccttcatgtcttctactgcatttcagtatcatgaaaagacccacaccagagagaaacactatgaatgtaagcagtgtgggaaagccttcatttcttccggtagccttcgatatcatgaaaggactcacactggagagaaaccctatgaatgtaagcagtgtggtaaagccttcagatctgccactcaacttcagatgcatagaaagattcacactggcgagaaaccctatgaatgtaagcaatgtgggaaagcctacagatctgtctcacaacttctggtgcatgaaaggactcacactgtagagcaaccctatgaatataagcaatatgggaaagccttcagatttgctaagaaccttcaaatacagacaatgaatgtaaacaattaaatgtttatagcagctgcatactaacatgttattctgtattttttttttctttttgagacagagtctcgctctgtcacccaggctggagtgcagtggcgtgatctcagctcactgcaagctccacctcctgggttcacgccattctcctgcctcagtctcctgagtagctgggactacaggtgcctgccaccacacccggctgattttttgtattttttagtagagacggagtttcatcgtgttagccaggatggtctcaatctcctgacctcgtgatctgcccgcctcagtctcccaaagtgctgggattacaggtatgagccaccgtgcccggccgttattctctattttttgttgttgtttgagatgagtcttgttctgttgcccaggctggagtgcagtggcatgatctcgcctccgggttcaagcaattctcctgcctcaggctcctgaggaaaaagattcctaggattacaggtgtgcaccaccacacttggctaatttttatatttttagtagagatgaggtctcaccctattggccacactggtcttgaactcctgacctgaagtgatccacctgccttagcctcccaaagtgctgggatgacaggcatgagccactgcacccagctgttattctctatttaattaattgagaagccataataaaatatctcagtgccatcatgcattagatcaagtttatgttaccacattattttttggacattgtgagtcaatattaccaagtggacaaaatcccaggcatctttttcctcatgtaaattttaattttcatgcttatatacttagaacatttatcttggtcctaattttttgttcattcataataccaaaagttatctcatgttcttcagagtgactttgtgccatatcccacagtggcatacctgtcttcaaagagggtataattcacaaaaggacttacactagaggaaaaccctatgaatgtaagctgcgtgggaaagcattttctgatctgagtggcattgaaacccacatggtattgcacatgacagataggcctctctccccgttcatttctttttttttgagacggagtcttgctctgtcgctgaggctgagaacagtggttccatctctgttcactgccacctccacctcctgggttcaagtgattctcctgccccagcctcccaagtagctgggattacaggtgaccgccaccacgcccagctaatttttgtatttttagtagagacggggcttcactatgttggccaggttcgtctcgaactcctgacctcaggtgatccacctgcctcagcctcccaaagtgctgtgcatacaggcatgagccactgcacccggccttctccccattcattttcaaagacataaaaggatgcacaataaagagagaccctctgaatgcaagcaatatggaaaagcattccattgtatcagatccttttgtagccatgaaagaactcgctgaagagaaaccctgtaaatgaagggaatgtgaaaagccttcattcctgaaatgaagcaattcatactattaatatatgagagaaatcctattataagaaattgattgctgtgcacggtagcttacctgtaattccagcacttccagaggctaaggcaggtggatcacttgaggtcaggagttcaataccagcctgggcaacatagtgaaaccctgtctctaccaaaaatacaaaaattagccaggcatggtggcgcgtgcctgtagtcccagctactcaggaggctgaggcaggagaatcacttgaacccaggagctggatgttgcagtgacccgagattacgccactgtaccccagcagagtgagactccatctgaaaaaaaaagcaaggggccggcacggtggttcacgcctgtaatcccagcactttgggagaccaaggcaggcagatcacctgaggtcaggagttcgagaccagcctggctaacatggcaaaaccccatcgctactaaaaatacaaaaaattagatgggcatggtggcacatgcctgtaatcccagctacatgggagactgaggcaggagaattgcttgaacctgggaggcggaggttgcagtgagccaagatcacagcattgcacttcagcctgggcaacaagagtgaaactccatctcaaaaaaaaaaaaaaaaaaaattgaggaagcattcagttgtcccacttcctttcaaacaggaagagacactagagagaaaccctctgagataactgactgttgaattaagaagagaggcctggccggacacagtggctcacgcctgtaatcccagcactttgggaggctgaggtgggcggatcacgaggtcaggagatcaagaccatcctggctgacacggtgaaaccccgtctctactaaaaaatacaaaaaaactagctgggcgtggtggtgggcgcctgtagtcccagctactcgggaggctgaagcaggagaatggcgtgaatccaggaggcagagcttgcagtgaaccgagatcgcgccactgcactccagcggcgacagagcaagactccgtctcaaaaaaaaaaaaaaaaaaaagagaagtctgacaggacaataaaatttagaaatggagttggaggatgtcataatacaattcaccagtgtcctatcttacatgcaatttcaaaggcagacaagaggaagtcatcagtcacattttagaggcaccaaacaggtgccacatccatacaggctgactccctgctcccagcccattttttcctgaatctttggcttgccaatcaagaatgtcctcaaaatttgctcagaggtgtgggcctttgggtaaaggtgtcttcagaagctccacattaaagatccatcagtggttaagggcaaattgaagagaaataaagactaagatatttttttaaaagactgaaagaatagaacaatgaaaaagccccatctgtaatacagtttttctttttctttttttttgagacaaggtctctctctgtcacccaggctggagtagagtggcattatcctggctcattgcaatctgggcctcctggtttcaagtgattctggtgtctcagccacctgagtagtcaggattacaggtgcacaccaccacgcatggctaaatttttgtatttttagtagagatggggtttcaccatgttgagcaagctggtcttaaactcctgacctcaagtgatccgtctgtcttggcctttcaaaatgctgggattataggcgtgatccactgtgcctggcctggtgtttctttaggtataatgtctttaccagagagctaatgcagactgtcatgggtgagattgttctctgatgttcaattcccctactttgtatattgagtcagtatgagatgcgatttgtttggcaagcacctttgttcctgctgttactgacccttatcttgtagcctcacagctactatgcttttgtccagtccaactagataggagcttcttcctctgctgcagtgactggtctcacccagggctttcaggaaggtgagaataagcaccttcctcctcccaggaagttttgagtttcctgtgtttcatttctgaatgtaatgtctccatttattttcaattatgtttgattatatttgattaaaaacaataatttttttggcaaccaagatttctgtacatgtgtcatagaaatagttgaacttttccacaactgtatactgacaaacattattctttcttaattaattcagtagctatattaaaatatgtattagatcaagttcataatgttgccaagttattggttggacattgtgagtcaatattaccatgtgaatagaatgccaggcatgctttttctcatgtaaaaaaattttactttttatactcacttatatccttaaatttttttgttgtttgtttgtttgttttttttgagacggagtctcactctgtcgcccaggctggagtgcagtggcatgatctcggctcactgcaagctctgcctcccgggttcacgccattctcctgcctcagcctcccaagtagctgggactacagttgcctgccaccacgcccggctaatttttttgtatattttttttagtagagacagggtttcaccgtgttagccaggaaggtctcaatctcctgaccttgtgatccacccacctcgccctcccaaagtgctgggattacaggcgtgagctaccgcgcctggctatccttaaattttttatcttagtcctaacttttctttttttctttttctttttctttttttttttttttgagacgcagtctcgctctgtcgcgcaggcttgagtgcagtggtgcgatctccactcactgcaacctctgcctcctgggttcaagcgattctcctgcctcagcctcccaagtagctggggtgacaggcgccggtcaccacacccggctaatttttgtatttttagtagagatggggtttcaccatgttggtcaggctggtttagaattcttgaccttgtgacccacctgccttagcctcccaaagtgctgggattacatgggtaagccaccacgcccagcctcttagtcctaacttttcattcattcattgtaccaaaagttaactcaatgttctcagtgacgtcttgccaaagaccaccagtaccatacttgttgtcaaagagggtgtaatatagtaataaatatgatcaaaagccataaatgacagtgagatatatgagaattacaaatgagtcacattactgaaaaaaatttgctcagtttgataatttgaaatatgttttcttctatactattttgagacatggttacagagtgtccttgttttgtcttgatccgtcatggtcactgaagagcattgtctcacattgcaggtgtatgacatgtgtctttccaatggcataagacttggccttgtggccgggcgtggtggctcatgcctataatcccagcactttggaaggctgaggcgggtggatcacctgaggttgggagttcgagaccagtctgaccaacatggaaaaaccccgtctctactgaaaacgcaaaaattagtcgggtatagtggcacatgcctgtaatcccagctacttgggaggctgaggcagaagaatcacttgaacccaagaggtggaggttgcagtgaactgaggtcacgccattgcactccagactgggtaacaagagcaaaacaccgtctcaaaaagcaaacaaagaaaagacttggccttgtggtgagaggaggtagctcctggacttctagacccatttttgccttatcttttttttttttttttttgaactactgagcagctgggattacaggcactcgccactacacccagctaacttttatatttttagtaaagacagggtttcactatgttggtcaggctggtcttagactcctgacctcaggtaatccactcacctcagcctcccgaagtggtgggattacaggcgtgagccaccacgcctggccaaaaaatatgcatattttaaatatgcatattttatttttgtattttttcatgaaggaaggtcaaataacaaaacaggaaaaatcctttttaagataagtgaactttaaattttcctcaaaaaaacttataattcacacctgacccaacatttcatcatccagtttttgttttgttttgtttttttgagatggagtttcgcttttgttgcccaggctggagtgcaatgccacgatgttggctcaccacaacctccacctcccacgttcaagcgattctcttgcatcagcctcctgagtagctgggataacatgtctgtaccaccacacctggctaattttgtatttttagtagagatgaggtttcaccatgttggtcaggctggtctcaaattcccaacctcaagtaatccgcccacttcagcctcccaaagtgctgggattacaggcatgagccatcgtgcccagcctatcatccagtttgtttgcagtatcacaatgttttattcagaaacatttactaaatttgggccagacacggtggttgttcaggctagggtataatggtgggatcatagctcactgcatccttaactcttgggctcaagtgattctctcgcctcagcctccaacatatgtgggactacaagcatacaccaccatgcccaggtaactgttttgtttttttttttaagatggagtctacactggcacagtctctgctcactgcaacctccaccttctggattcaagcgattctcctgcctcagcctcccaagtagctgggattacaggaagctgccacgccaccatgcctggctcatttttgtatttttagtagagatgaggtttcaccatgttggccaggatggtctcaaactcctagcttcaagtgatccatccacctcggcctcccaaattactgggattacaggcgtgagccaccatgtcctgccagattttaaaaattttctgtggagatgtgatctaactgtggtcccaggctgctctttaacttttagcctcaagcaggtctcctccctcagcctcacagtgctaggattataggcttgagccatttcaaacagccaaatttaacttttattgtggtgttgaaaggaattttgtatgtactttcttctttttttctttttttttttttttgagacggagtctggctctctcacccaggctatagtgcagtggtaagatcttggctcactgcagcctccatctcccaggttcatgtgattctcctgcctcagcctcccaagtagctgggatacaggtggccaacacgacacctggctaatttttctatttttagtaaagacatggtttcaccatgttggccaggctggtctcgaactcctgacctcaagtgatacacccatctgggcttcacaaattgttgggattactggcataagccaccacacctggcatttgtatatgcctttcttgtattactttgaccatggtaggacatatacaataggcaaatgatataaaaggccaaggcgggcagatcacaaggtcaggagttcgagaccagcctggccaatatggtgaaaccccgtctctactaaagatacaaaattagccgggcgtggtggtgggcgcctgtaatcccagctactcgggaggctgaagcaggagaaacccttgaacctgggaggtagaggttgcagtgagccaagatcatgccggtgcactccagcttgggagacagagcgagactccatctaaaaaaaaaaaaaggttaaatttaatttttgacaatcactttaacacacaacttaggtttatatggaaagagaactatgaccacttgtgaacaagtaactggtaagtaagatggaattatggcttctgtgtgatactctattgttaggcaagcacaagctccttataaaagccctcatatatgtaaatgcatcaaatatcatgtgactacttggtttcctaaggacagtttattattcctttatcccagtataattttgcatagtcatcactctctttgttatgggtatctatacttaaagaataaatatatatgagttatctacacatgagctaaatgaggttttgtaaattgaatgatatttttaggaaagtgttggactttgtcaattaccatgcctgatatcaatgtgtcttacctgactatatcactcctaaaaatttcactgcgggccgtggtccctggatttcctgagggttgattgcccatccccattcctgtagacgagcacacaatggtataagactttcctgtaacacattacagtcttcagaggttaacgtgatgtcatcaatataatgaaaccagggccaggtcagatggctcatgcctgtagtcccagtgactcaagaggctgatgcatgagaatcacttcagcccaggtgttcaaggctgtagcgaggtatgactgcatcactgcactctagcctgagtgacacagcaagacccaccctgtcaaaataaattagatagatagataaaataataaataatgaaataaaaaaatatataaaattaaaccatgaaagatgacaggaatgggaacaaagacaagcctctagccaacattctgtgacaaatcctaggactttggagataaccctggagcaacccttgaatggcagccgactcaccagggcatctttctggacttccatggattaaaacacactccaccatagcatctactaatgtgacagtcttctctctattttgggggaccagtaagtggagagctgaacatgaacccttttattccagtagcagcctggcagggtaaaagcaaattggtcttgtgattatttagagagaggaatgctgaaaaaaacattagctaaatctaacgcactgtgatgcatccccagcagggacactatgtgatcagctacctgagtaataggaactacaggatgtatggttgggggttaccttggtcaattcctggtaatctgcagtcatccaccaggtactgtttggtttgtgttcaggccagagagactgttaaaatgagtttgagctgggtggataatgtgtccacttaccagtgcctcaatagttgcacttatttctttttttttttgagacggagtctcattctgtcgcccaggctggcgtgcagtggtgtgatcccggctcactgcaagctccacctcccgggttcacgccattctcctgcctcaccctcccgagtagcggggactacatgcgcccaccaccgcacgtggctaatttttttttttttttttttgtatttttagtagagacggggtttcaccgtgttagccaggatggtctcgatctcctgacctcgtgattcacccacctcggcctcccaaagtgctgggattacaggtgtgagccaccacacccggcctagttgtacttatttcatcatgtcctccacagcccccccgcccaaaataatttgtactattatttatttatttatttatttatttatttatttttgagatggaatcttgctctgtcgcccagactggagtgcagtggtggtatctcggctcactgcaatctcctcctcccaggttcaagctatccgcctcctgggttcaagctatcagcctcccgagtacctgggactacagatgtgcgccaccacacccagctaatttttgtatttttagtagagatggggttttgccatgttggccaggctggtctcgaactcctgacctcaggcaatccacccacctcagcatcccaaagtgctgggattacaggcgtgagtcactgagcccagcctaataatttgtactctttaaacttgacaactcgcctaggagcagaaagctgttcaggttcccattttgcctgtccttgagaacagcctttactacagcacgttcaagctgaattctcccactcaagtttgcgaagtctttcctaacagaatatccatgcctaaaatgttttctaaaataggggtaataaatgccatatatgggttggggagcttcccaatacctagatgtattaaagtcctttttatctgagtcatttgtcctctataatcatcagtgtcaggccactgttcaggatttgtttctggatttccagagatgaaagtacattccaccctgtaataggattacagactattactaaggtaataatctttttatttgggggggcaacaagaaatggtgagcttgatatgggacctctggtttccacctattgcttgaacatggggttgaccttgccccagtcctaatctctgagctatggtggaatccactcctggtagagtgggacgatcaaatgaaagattgagtcatcttcctattcttccatagaggcagaagggaagggatgaaactgcagtttaggctgtagtttctaccataagggtactaataaagtcttaggttgtttgtctgtttctcttcagggtgtttctgcccccaacaaattatgccacatttgctcatgggtgactcctattggtccctttccctatctccccttttctttctgttgatttttcttttttccctttgttagcccttgttggattaccgagtttaccctgttcctgagtttctaaatttctccaaatctgcagtgcttctcccacatcatatacacattgtcccactataggactcgagaaagatagcaaagggccatgccattcctctggtgcaccctgtagcattttttaaatctgggcagtacaaactgctttactggtcccatggaaagccactcctagatggcttgcctccttcctcaacctccaagaagccccagggttacagaatcaccaggttcatatgcacactgtgcagtaacagaccaatacactgagacagcaagatttgcagcacagaaagagtttaatgatcatggggtgacccagcaagcagatgagaggggccctcaaatccaactcctcaaaaagttctgggctggattttttgttttttggactagtcaattgaagcagtgggaatggaggagaaacaaagacatctgtaactggttgtgatcaattagttgtaaacaccactgcacttggacccacactaggctgggatttttaaggggattgtggcatgcaagaggctgaaaaattgaggtggttgattgaagtacaggcaatgaaatcatcaggatgtgaaaactaccttctttggtgagtcagctactactggggtccttcagagcagctgaagtcagtagtttcactgttatgcaggacctgaaataatatctcaaagggaaaaattaacattttttaatgttcaagtttttatctatagagcagttaaggggaattatcatctagggtttacaggattctaggacgctaggcatcaaacaactatgaagggggccaggcatgggggctcatgcctgtaatcccagtactttgggaggctgaggcaagcgaattgcttgatcccaggagtttgagactattctgggtaacatagtgagaccccatctctatttcaaaaaaataaaaaaaaaatttggcgggggggtcagagagcaagctgacctaataattaatgctgaatgtgcagcaagctttgtttatttcaattttctccctccctccatcattgattaatttgacaaaatttaaagggatggcttcatcagcatttcttccgttgactgctaggacgtcatctcttctggtaaatcttcagcaggccaagcatctcttatgggtagaatgatctagtccataagggaataccatcacactgtgtcccacaattggatgatccaagtggtcccgggaatccccaggtaggatggtttcatttcttttttttttttttttgagacagtgtttcactctgttgtccagcctggagtgcaatggtgccatctcagctcactgtaacctccaccgcctcctgggttcaagtgattctcctgcctcagcctcccaagtagctgggattacaggtgcccaccaccatgtccagctaattttttgtatttttagtagagatggggtttcaccatgttggccaggctggtcttgaactcctgacctcaggtgatccacccgcctcggcctcccaaagtgctgggattacaggtgtgagccactgcgcccggcctttttttttttttttttgagacagagtcttgctccgtctcccaggctggagtgcagtggcgcagtctcggctcactgtaacctccacctcccaggttcaagcgattctactgcctcagcctctggagtagctgggactacaggcgcctaccaccacacccggctaattttttgtatttttagtagagacggggtttcactgtgttagccaggatgggctcaatctcctgacctcgtgatccatccaccttggccttccaaagtgctgggattacaggtgtgagccacgcccggcttggtttcattttgtggcccaggctggagtacagtggcctgatcctagctctctgcagcctcggactactgggttcaagtgatcctcccactgcagcctcttgagtagcttgggactacaggcacaggccaccttgccaggctaatttctctctctctctttttttttttttttgagatggagttgcgctcttgttgcccaggctgaagtgcaatggcacgacctcagctcacagaaatctccgcctcccagattcaagagattctcctccctcagcctcccgagtagctggcattacaggtatgtgccactatgcctggctaattttgtatttttagtagagacggggtttctccatgtttgtcacactggtctggaactcccgacctcaggtgatccgcctgcctcagcctcccaaagtgctgtgattacaggcatgagccaccgcgcccgaccttctttttgtttgtttgtttgtttgtttatagagacagggtctcactcttttgcccaggctggtcttgctctggtcaggctgtctccaactcccagcttcaagcgatccgctccccttggcctcccaaacttctgggattacagatgtgagccatggcaactggccttccaggtatttattgaaaggttttgcaacctctgattgttctgcagcagtatattacctgacaatgagagtcccctgcatcctttcaccccatgttgcagaagttgctgcgctttccccttttgtttgcatagtgggacaagcatgtcaatgatcctcatcctcctcttcatcaatgacttctttgtcatcagtcttcctcttcataaattgccaaggaatccaagttctcacatctcaatcgggcttacttatgatagtagcagctgtcataagtctgcatcagctcccacagctccaggctccatcaagcctgactcctttttcttccccacagtcatttcccagaagcccccagctctgcttgccaggtgccttaggctgtacagctgcactgctgctgagtccaggcagctatctgtccctgcagccccttccccaacccattcccagcccagccccactccaccactggtatctctagtgtccctgactgctagtgcctcagccaccgccgccactgcgatttggaagtcttttaatgcagttaaattatcttagttttttctctcccagtttatatgtacatacagaaggaaagcagggattctgctagtgtcttattcacacagtgagattgtagatgttggtctggtggacgtgatcagtgggggagagaagtaggtgaataacctgcagggggcagcagagcccaagaccagcctggagcctgcaaagggaaggaaaatgagctcccttgggtgtttctgagcagctccaggagtggattctgagaagctgcagagccctggaacacaggagacccaagtgcagatgcatttggggtggcggacagggggcatgcagagggggaggtgttctgtcatgtctgaggttggacctcaggagcctggggccatttggagggcagtgtttttggttttggcatgcatagggtcactgggttcaggcggtaatttgtatatatgaagaaaatctgtgaaggtcagtgtgcgagaattgtttggaacatcacctggtgaaagggtttacgaagttgacagtttatttaggttagaagcttaaactgactccaagggatagtctcctgctgttgaaaatgaagttctggaaggagggagtgttcccatactgtgaggagagatggtagatgtgtgaggaagctttgtccatgcctcatcccctactcctgtccccctggaggacatctgtctctctttcctggtctagtcgtgcctggcctggtctcggttcccctcctgctctgaggcaaacagatcgccccagcagacactgagtctggaatttcctgcatacacttgtgacctgatgcaggaggaaggagcagagaaagcccattgagtgaaggagaggtcagtgccctttctaaagttcaggaaagaggccaggcgcggcggctcacgtaatcccagcactttgggaggccgaggcgggcggatcacctgaggtcaggagttcgagaccagcctgactaacatggtgaaaccctgtctctactaaaaataacaaaaattagctgggcgtggtggcaggtgcctgtaatcccagctactcaggaggctgaggcaggaaaatcgcttgaacccgggagacagaggttgcagtgggccgagatcgcgccattgcaccttcagcctgggcgacaagagcgaaactccgtctcaattagttaatcaatcaaccaatcaatcatatatatatatgaagttcaagaaagtttggcggaaatgcagatatccaaggatcagggcacagggagggaggtgggccttaaagaggaagtgaatagaaccagtctggctctgcagggccccgttatcccgggcttctgctgtcactcagggctctgaaggcgaggcggggagcacggtccaatcaggagcgccggggcggggccctgccaacttttttcggggaaggagacggctgcaagcccgcggtctcttgttgctgtgctaacgaccgttggaaccctctttctggctcttggaacgctcggctctgagaggctccaggtttctccgccagagctcctgtcgctctgtcagttgcgctgtgttcctctctagtcacaagagccttggggaagacagttggaagctcagacatggtgagtgtgtggggccaggcgtcctgagacgggggcgaagggcttcttagaacctgctggaaccggctgtggcgggacccgggcctccccgcggcgactccggggtctgtggggctgggccggcagccgggacccggggcatcctgtctcgtcccttcgcagcgaccgcggccccggacccggagccctctttgggcagctccgcgtcttcagccgcgggtctcctcagattgtgctgggccatgaggaggatcatggggggaatcccgtctcgggtgtagggttcttgcgtcagaaaagcggtggtctgtggagtccccagtcgtcttttctcctcttaaaagttaaaatggccgggcgcggtggctcacctgaggtcaggagttcgagaccaacctaacatggagaaaccccgtctctactaaaaatacaaaattagcctggcgtggtggcgcgtgcttgtaatcccagctactcgggagactgaggcaggagaatcgcttgaaccctggaggcggaggttgcggtgagccgagatcccgccgttgcactccagcctgggcaacaagagtaaaactccgtctaaaaaaaaaaaaaaaaaaagaggcactgataaaaattcaagagtttgtgcaaatgggaattcatgaatgagaatcacgcagtcatggtttgtggtttgttaccagaaacatttggaaatattgcagttgagttggatttcagtgcccttaggtaggaccttagtgcactacacacacttcagtctgtttacttgtttaaattttttcacgctgtccacatggactggtttctccctccattttccaaatctgtgggatacagggtctcacaccctccccgctatgaccccagcctaactctttaaaggcttgcggtagcatcttacattttcagttcccttcccacatttccaaacattaactcctcttctccaattcacagtattttcaactatttgtacttttttttttttttaaagatggagtctcactctgtcacccaggctggagtgcaatggtgtgatctcggtcgccgcaacctccgccttccgggttcaagcgattctcttgcttcagcctcccagagtagctgggattaaaggcgtccaccactatgcccggttaatttttgtatttttagtagagacagggtttcaccaggttggccaggctggtctcaaactcctgaccccaagtgatccacccgcctcggcttcccaaagtgctgggattacaggcgggagccagcgtgtccggcctatttgttctttattgtacaatatattcatcctttccttcaaatagatgaagtattttaatggtgtttttttttttttaacagagaaatatgattccacaggacaatgaaaacccaccccaacagggtgaagcaaatcaaaatgtatgtggggtacacagtgcagtggggaatgacacaatacagtgttgatgagaaactgtcattgagcacatcagtgagcaggatagcagtggggttttgacaacacaaatgtcatatacccaccagttttgtttttggttttgtttgtttttggttttgttttgagacaggatttcgctcttgttgcccaggctggagtacagtggctcgatctcggcccacagctgcctctgcttcctgggttcaagcaattcttctgcctcagcctcctgagtagctgtggttacaggtgcgcgctaccattgccagctgatttttgtatttttagtagagatggggtttcaccatgttggccgggcttgtttcgaactcttgacctcagatgctccacctgccttggcctcccagagtgctggaattacaggtgtgaaccaccacacctggcccaccagtcttatttatttatttatttatttattttttgagatggagtctcactctgttgcccaggctggagtgcaatggcgtgatcttggctcactgcaatctccgtctcccgggttcaagtgattctcctgccttagcctcccaagtagctgggattgcaggtgcctgcgaccacgcctggataattttgtattttagtagagttggggtttcaccacgttggtcaggctggtcttgaactcccgacctcaggtgatctacccgccttgacctcccaaagtgctgggattacaggcgcgaaccactgcgcccagtctatacctgccagtcttacacagaagagtttcactgccctaaaaatcctttgtgctttgtgtagccatcacactcccctccctctcttccactaaccccttaatccctggcacaaccgatgattttattgcctttagagttttgccttgtccagaatgtcatgtacttggaatcatgttgtaagtagccatttcggcctgtttgtttcacgtaaaaatacgcatttaaagtatctttgtgtctatgtggcttgataacagatttattatttctttattttacaaaattttaaagagatggggtctcactatgttgcccaatgtggttggcggatcacgaagtcagaagttcgagaccagcctggccaacatagtgaaaccccgtctctataaaaatacaaaaaaattagctgggcatggtggcaggcacctctaatcccacctactcaggaggctgaggcaggagaatcgcttgaacccgggaggcggaggttgcagtgagctgagatcgctccattgtactccagcctgggtgacaagagtgaaactccatttcaaaaaaataaataaaaaataaaataaaaaataaaaattacatttggccaggcatggtgactcattcctgtgatctcagcactttgggatttaccctatacctatttgggcacacaaatcctgtaactgggggtaacccccttagggagtgaggagaatcatggaagttaggagtggtcatttattacatatgtggataataataatgttttgtgtatattaggttaaatagtataaacattgtaattgctagatttacataaattgataggttaggattgtgaaagaaggattagatgttaaaattgtgattattcaatttgttgtgagcaattgccaaataggccaagatatttcacagctgtgtttggttaaggtccccttaaccaatctcccatagtgttgcaatctcccatagtatgtttaagtctgttgatgagtagacttgaaataaaatggagatcagtgctagtttttgtcatgtaagtagaattacacttgatattagtgagaccccttgcattacttcagaagtgaaagggggatagtcctaattttatcaccagtgctgtgataattataagggatgctatttggtttagggcttttgtgattgttcattgtctggagtatatcatattgttgatgatagctactaggatctactagtattagagatgcagttgcttatgtaaggaaatactttggtggtggcttctgtggagcaggcactttttcagttagaatggggataatggctagcatatatctaacctcattcagattaggagccagtgtaagtccattattataatcagagtctctgtgaaaataatataaagagaatagtgaggagatgtaggggatgaatttgaataggaaggatataaacattttcaaggtatgggctgggtagcttatttagcttaccctactgtaggatatggtgtcctaggtaccatggagaatctggaattctcaggagtgggttcagttcctacagttctagtaataagagggtttaaacctctataatttattatattaaagtaaccattctatcatacatattttttatgtttgtggtgggatactagatattaggatgggcattgagatatatgcacaggactcatgtctggggtaaacagttttttcacagaagatgcttaagttgggcatttggtcggtggggacccacgcgggttcaacatgcatatcgagaagtgttatttctgtttggggcccatctaccctggccatggcattatgttcttctgcaacaattgcaaggtgttcagattttgtaaatctaaatgtcataaaaactttaaaaagaagtgcaatcctcacaaggttaggtggacgaaagcattccagaaagcaactagtaaagagcttacagtggacaattcatttgaatttgaaaaacatagaaatgaacttatcaaatatcagcaagagctatggaataaaactattgatgcaatgaagagagttgaagagatcaaacagaaatggcaagctaaatttataatgaacggattgaagaaaaataaagagctacagaaagttcaggatatcaaagaagtcaagcaaaacatccatcttatcctagccccttttgcaggcaaagagaagcagttggaagagaaaatggtatagcatttacaacaggatgtggacatggaaggtgcttcttaaaaatctctgtaaccatttctttatgtacatttgaaaaagccccttggagaattagaactgctaaattcttagtttattttttacataaggtcactcaaatgaaaagtaattaaaatatatttttcctacattactgtctacaagacatcagatattacggatgttagattgcatctcagtgttaaattttcactgacagatgtacttatgtaaaaatcatgaaaattctgcttataactatagaagtgaattgtggatttaaatggttatgctgtttggataatggcacgcggcgcatttctgtaataactgatggcaaaaattcatggctagtgatgtacaaaataaaatattagttagagtaaaataattcacttaaagttatagaaggggaatacaacaaggaactaacaattgtatgacagtgtcaaatattattttgattttagtatttactgttttggtttatttgcatcttagaagagcataatggcattgtttgatgaagcctcattatgctggactgttttgacctgtttaattgttctgataggtagttgtagatattggggatgagaactgaacaatctttgcctgaaatggcactgctctctagaatttccactttggagaatactcagaacttgtgattcctggtagaacaactttttttctagactagcaactatctagaagcagaggaatctcattgccttttaaaatctattatgtggttttcttttaaaaagctcttgtttttggaaagtagaatttaggggaaaacatctgttcattatttgcatgtaaaaccagtttaaaagtaagaaaaaaaagaacatgcataagttgatcataccaaaatcatgggtatgatacctgaaacctgaattcataagaataaaattgttttttactttctttctttttttttttttttttagttggagtcttgctctgtcacccaggctggagtgcagtggcgcaatctcagcttacggcaagctccgcctcccgggttcatgccattctcctgcctcagcctcccgagtagctaggactacaggcgcccgccaccacacccggctaatttttgtatttttagtagagacaaggtttcaccgtgttagccaggatggtctcgatctcttgacctcgtgatctgcccacctcggtctcccaaagtgctgggatgacaggcgtgagccaccatgtccagctgtaacttagaactatttaaagaggcaaaggcataggagaataaaggaaggaagaagtaactcgtggaatgttgcgaaaggaaaaacacgtttaaggaagaggaacaggctatgacttaatgtttgcttggaccagtataagcatgccagggcaagtatttaggctaacttgtgggagttaagaatataaagttgccaagaccagcttggctggggagacgctaacccagcagcgctagaggaattaaagacaccacacacaccaaaatatagaggtgtgaagggggaaatcaggggtctcacagccttcagagctgagagtcttgaacagagatttatccacatatttattaacagcaaaccagtcattagcattgtttctatagatattaaattaactaaaagtatcccttatgggaaacaaagggatgagccgaattaaaggaataggttgggctagttaactgcagcaggagcatgtccttaaggcacagatagctcatgctactatttgtggcttaagaatgcttttaagcggttttccgccctgggcgggccaggtgttccttgccctcattctggtaaactcacaaccttccagtgtgggtgttagggccattatgaacatgttacagtgctgcagagattttgtttatggccagttttggggccagtttatggccagattttggggggcctgctcccaacatgtcccctttctttgatttgcaaatcaataaaagcaagggcagctttgtcacagtgagctacttctcgcaggagtcaggatccacgtctgcagactatacaaggacaacacagattaaaagcacagtcatcattgaaatcacagaacttccaagtgtttttatccattttcagctccttttaagcactccagttctggcattaaggtcagctgtgcctgggatgctttaaatatttgttcttttaattttaaatccttatattaagctcctacaatgcaccatatcatttgaggttgaggtgccactataccgccatggttccagataataggaacttttgccatacttcttatcatttctgccatctgaccgttttgttcagatcagctgaacatagtgtggccgtggcatgtagactgagaggtgcagtttaagctaaacatccccttaggggaccaattaataatgattccatagaaattgttgtgcagcacctctgcctgttccgcaatgcaatcttcctaaacaagtacgttcattttttctaactgggtccgatcctgtttacaaataggtttttgagggcggtatgcctcaattataggagcagatttattacggtaaatactgagattagaaagcatgtgtaactgtgtcatagagtgattgcatccaggcattattaccagtcaagattgataaatatgcccagtaagtataatcattctctgtgtcagcccttattgaaggaatactcaaggtagtggtgataactgctgtcatagctaccattaaattattcattgtgactggttgtcccgctttcctcaggttttcttccgccatctgtgacagcttcttgatctgtccccaggtgggtggctgtgttcgatgggtgttgctcgtgacagttggggtcctcctcagcgtcagtctctacatggctgcaaccggggagtccttgggatcctctcagagtctcttcctcagcatctggctcatgataaggtttcaggtgtcttgatagtacccaaatcggctattgattttggtctagagaaacacaagcataatctctactccaagttattattttacctatttcccaactttttgttactgaatatctccaccaaatcagttgttctgcttctttctttgcagctggtttctgtagatgctgttcagttgctgataacatctggcctttgggcaggttcaaaacatttaatgttaataatgctacgttcagttgtatctgtggggttccatattctctatttccccctttctgcttttgcaactgctgttttagggaaagattcattctttccactatggcttgtccttgaattgtatgggatatcagtaatgtgtttaatattccacatagagaaaaatgtagctagagcttggctagtatagcctggggcattatctgttttaatagaagctggaatgcccatcactgcaaaacactgcaaaagatgacgtttaacacaagcagaagactctcctgttggcatgtagcccagacaaagtgagaaaaggtgtccacacatacatgtgggcaccaaacgagggaatatgtgtgacatctatttgccaaagagagttaggttccaatccttgaggattaaatcctcctgtaaaagatgaggaatgtaccatttggcaagttggcatcgctggataatagctttagcttctttccaggtaatgctgtatctgtgtttgaggccagaggcattaacatgggttaaattgtgaaagtgtctagcattagatattgcattagcaactaggcgatcagccatttgattcccttcaatcaaaggtcttggaagaggtgtatgagccctaatgtgagtgatgtaaaaagggtgcattctacttctaactgctgtttgcaactgggtaaataaagtaatcagttgttcatctgtatgaaatcgtaactgcgcattttcaattaactgtgtggaatgaaccacgtatgaagaatcagaaatcacattaatagacatatcaaaagcagtcaatacctcagttacagctacaagctcttgctttttgagctgaagtatagggcgtctggaaaactttactttttgagccagaataagaagctttaccattactagacccgtctgtaaaacaatgaaaatgcttagcaggctgcaggttgtttactgcaagaattgtaaatgcaaaccattcacagttttgctcagctaaatggatagtaaagaaacagtctttcaaatatatgactattaaaggccaattttttggaattatagtaggagaaggcagtcctggctgtaatgctcccataggttgtataactgaattgatggctcttaagtcagttaacattctccatttacctgatttttttcttaattatgaaaactggagaattccaaggggaaaatgttggagctatgtgtccattttgtaattgttcaatgactaatttctctaaagcctccagtttctctttacttagcggccattgttctaccaaattggcttatctgttaaccattttaaaggtataggttctggaggcttgacaatggccaccatcaaaaataataccctaatctttggcaggaactttctttctgcttgaagcagttctttcaaaccttgcaaatttttttctagtcccataccagggacataccccatttcatgcattgtatgttgactttgagggctatataattgttctggaattagaacttgtgctccccattgtcataaatctctcccccataaatttacaggtacagaagttataattggttgaatagtaccaggttgtccatcaggcccttcacaatgcaaaatataactactttgatatactttaggggctttaccaactccaactatgttaaattgagcaggttgaattggccacgtggacggccagtgctgtagagaaatgactgaaatgtctgctcctgtatctaccaaacctttaaatttctttccctgaatagttattttcacaggtaggatgtttatcagtaatttgatttacccaataagctgctttgccttgtttatttgtgcttccaaatcctcctgttcgtttaatttcacttttccccatttccacatacgacacaatcaggagctgtgctatgtgcgctctcctggctctgctttccagggaacagaagtagatacaacaatttgaatttcccattataatctgaatcagtgtctcctgtatgtatttgtacgtcttttaaacttaaactagaccttcctaaaagtaatcctattgtccctgctggcaagggtccgcagactcctgttgggaccttttgcgggggttccccaggcagaaggctcacagcttttgtgcagcataaatctactgcagcactactggctgtgggggggtggacagacattgtacaggggtgagggaatggcctgagctagaaatgccccggtttagaatggggccctcatggcgtttcccgaaatcgggttcccttctttatcaaacttaggatgacattggttaacccaatgttttccttttttacattttggacatatttcagaatcagcagttttcttttctccccatctggcggcctgactcgctgatttttttctacattcttttttagtatgaccatgcttcccacagttaaaacaagctccaggaagtggagtatttcctttatccactctcagtcctgccattgcctatgccaacaaagtagctttatgtagattatctctgatatcatcacaggccttgataaaatcaactaaatgtgctttccctctgataggtcacagagcagcctggcaatcgggattagcattgtcgaaagctaataactgcaacactatatcctgagcagccaaatctgcaatcatctttttaagagactcctgtaactgagctataaagtcaacgtatggttctttggatccctgttttatagcactaaaggaagggtattgttctctacctgaagtgattttttcccaagctctaatgcacactcctctaagctgttctatggcatcatcccgcatgaccagttgtgcatctaaaccagcccagcctccaacccccaaaagttggtctgcagttacattaatttgagtttgggcctgggcattgcgagcagcctgaatggaagcttcatctgcccaccaaattttaaattttaagaaccgagcaggagttagacaagctcgagtaagagcatcccagtcagtaggtatcatccaactggaaacagcaacattctttaacagtcccattataaaaggagaacctggtccatactgatgtatagctttttaaaattctttgagtaatttaaaaggaaaaggctcaaatgtagctgtaatatttccctgttgatcttggggggtgtattcattctaacagggaactgccaagcctctgtatcaccctctcctctagcttgctgaattcctgcctgaatagaactaagagtggtcactcggcgctgctcaaacagtcactggggcaactacttttcgcccagtgtcctccagaaaagaaagatctggagggtctttttcttgaaaataataaggagggggtacagaagggtagggatgaatctctccctcctttcctgctttagctttaactggcaaataaacctcgtctgtaacctcttctgttacttcattattcactcattcctcctcatcatcagtgtgaagaagttccaaggtgaaacgaaccagaccccatacttgtcccattgttaccctgaggcttccgagctccccttcttactcaccatggggattgctttaagagtactcgggtgtcctccagctagttttccgttccaaccattgctctggcgacccttcaacctgcattcaagcccccatgaatggacgccacttgccaagaccagctcagtcggggagaccctaacccagcggcgctagaggaattaaagacaccacacacaccgaaatatagaggtgtgaagtgggaaatcaggggtctcacagccttcagaggtgagagccccaaacagagatttacccacatatttattaacagcaaaccagtcattagcattgtttctatagatattaaattaactaaaaatatccattatgggaaacaaagggatgggccaaattaaaggaataggttgggctagttaactgcagcaggagcatgtccttaaggcacagatagctcatgctgttatttgtggcttaagaatgcctttaagcggttttccgccctgggtgggccaggcgttccttgccctcattccagtaaacccacaaccttccagtgtgggcgttagggccattatgaacatgttacagtgttgcagagattttgtttatggccagttttggggccagtttatggccagattttggggggcctgctcccaacataaagtatattgatgttttttttattacagctagtatatatttaagaatgttagtataggattttgaataaattttgtttttaagagaagttataatttaattagatggggaggaaagtctttgaagaggaacctctactttactttttataaagtgattctcctgctcagtctccccagtagctgggattacaggcatgtgccaccacgcctggctaattctgtgtttttagtagagacagggtttctccatgttgttcagggtggtctcaaactccttacttcagatgatctgcccacctcagcctcccaaagtgctgggattacaggcgtgagccaccatgcccagcctgtagtggttctttaatgagcagctttattgctttggcaaaaggttggaataatccatatgagcctatgatgttaggtcccttacagagttgtatgtaacctaaactattcattcaacaaatgttaagattgctgtagtgagaatggtgggaaataagtaggagaaggttaattataaacttattgttaagaagaaggattagtttactttgactagtacgtcttagtcaaaatcattttgaggttatattttgctctgaggtcacctcaactaaaatttttagttcattggatacaatgttaatacctgttaagttaggttaattattggatatatggactaataaatttaagttccgtagagtcttctcatcatatttaagtatttctgcctcttcacagataggtcaattgcactgattaagagacagctaaaccctcatgtgaccagtcttgcaagtctctgtttcgggaacaaatgattatgctatgcctgtacagtcaagatactggcaccattaaacatgtcactgggcaggcagtgccagtttttggtgatgtttttggtaaacaggcagggtttggttttgctgagttccttttattttttaaaatctttctttagtgcttgcctttgttggcttaacaatttggagaaaataattagtttataggtttgcttagttatattgagttttgttaactgtcagtggatcatccaaatatgatggtaactatgcatttttatacatattttatttatttatttatttatttatttatttgagacgaagtttcactcttgttgcccaggctggagtgcagtggcgccatcttggctcactgcaacctctgcctcccgggttcaagcaattctcctgcctcagcctcccaagtagctgggattacaggcatgagccaccatgcccagctaattatgtatttttactagagatggggtttcaccatgttggtcaggctggtctcgagcacttgacctcaggtgatccgcttgcctcagcctcccaaagtgctgggattacaggcgtgagacactgtgcccagcctttatacatattttatagtaggttgtagaagttccctcgtattcctgattatttctattttgaaggagtgttgaggtttgtcactttttttttgcatgtgtttagattgtggtttttgatgttgattctgtaactactgtgtattgcataagttgatttttgaaatgtaagcaatgttgcttccatgaattaaattccactttgtcatggagtacagatgttgtcatatatgggtggattctctttgcaattatattgctccggctttgtgtgttaacatttaaagagatattcatgtatagtattatagtctagcattataatatgcatatatatacacatttatatacatgcacacataaagtatatatagtatatagtctagttatgatagataacataaatattatatataacttgtaatgtggtatatagctgttgtatataaatggcattatagtaaacaacttaatgaattatgacattatagtatataaaattgatatagttttagtctccagtgtatagtgggtttcatttctatgtcagcctgcagaattattcaaataccacattctcatcctcccacgggaacaaaggaaaatcttaccctcttgatgctacagtgtgccattcaaaaatattcgtgatcatggatttaggaaagattctatgatatgacaatacaagcactaggaacaaagaaaaagtatgtaattgagactgcattgaaattttaaacttttttgtgtttcaaaggacaccacaccaggaagacattgaaaagcatatagccatgccagcctgaatgcacctgatcttttttgatctcagttcctgccaggattgggtctggttattacttatatgagagtaatactgggaatactgagtgctgtacactttaaaaaaagaaaaggggccgagcgctgtggcttatacctgtaatcccagcactttgggaggctgacgcgggagctcaggagttcaagactggcctcaaaaacacggtaaaccccatgtctaccaaaaatacaaaaaattacctgggagtggtggtgcacgcctttggtcccagctactcatgaggctgaggtaggaggatcatttgagcctggaaggtggaagttgcagtgagctgagatgatgccactacaccccaccctgggcgacagagcgagactctgtctcaaaacaaggtagagaaacttgatgaattatcatgggttgaggaaatggaacttgattgaatatcaagttttggggggattctccctgaactcccttagaaggatttttgatgtaactgggctctgcaggagaaggacaaaacgggtcaagaagagggcctaagcagcctgactcatgtttggtcaaggaaggaagaagtccgtaagactcccgtagctggctctttttaggaaggacaatccctaaatatttgatttcctcgctatattccaaaatacccgctttccctctctaaaggacatcttcaattatggatccaccctgacatatttgaaagagctgcagtattttaattgatttttatattcccacagagccatatatgactctctttaaaattttattatgttggctgggtccattggctcacgcctgtaattccagcattttgggaggccaaggcgggcggatcatgaggtcaggagatcaagaccattctggctaatatggtgaaaccccatcactactaaaaatataaaaaaaaattagctgggtgtggtggcaggtgcctgtagtcctagctacttgtgagactgaggcaggagaatgggtgtgaacttgggaggcggcgcttgcagtgagccgagatcatgccattgtactgtagcctgggcaacaagagcaaaactccatttcaataaaacaaaacaaaaaaacccacaaaaattagctgggcatggtcgtgggcacctataatcccagctactcgggaggctgaggcaggagaattgcttgaacccaggaggtggaggttgcaatgagccaagattgtgccattgcactccagcctgggtgacagagcaagactctgactcaaaaaaaaaataagtacacctaataattcctgatgttaagcaccttttttatgtgtgttgtggtcatttggatttatcttggagaaatgttattggactacattgcctatcttttttttttttttttttttttgagacagagtctcgctgtcttgcctcggctggagcacaatggcatgatcctggctcactgcagcttctgcctcccaaggggctgggattatgggtgtctaccaccacccccagctaatttttgtatttttagtgtagatgaggtttcaccgtgttgccaggctggtctcgaactactgacctcaagtgatctgcccgcctcggcctcccaaagagctgggattaagctgtgagccactgcacccagcccattgcccatgttttgatcaagtagttttatacttgggacagtaatttgtttatttattattttttttgagacggagtctcactctgttgccgggctagggtgcagtggcccaatctcggctcactgcaacctctgcctcccaggttcaagcaattatcctgcctcagcctcccgagtagctggaaccctgggtgtgtgccaccacacccagctaattttttgtatttttagtagagacagggtttcactgtgttaaccaggctggtctcgatctcctgacctcatgatccacctgcctcggcctcccaaagtgaatttattatttttaattactataaaataaaattacattttattagcttaagcaattttaagtgtacagtttacttagacagctctgtgtaacttatctaagatgaatcataatctgttttgtgtgtgactaccattgtgtaatttctatagcatcgtgaattttcatgtatgaagcatgggacagggtgttattttctaagattaaataatatttcattgtatgtagatgcctaccacatttttgttatgcatacaaccatcagtggacatgtggatggatccagctcttggctattgtcaacagtggttttcaaatatgtctccatgatctggttttctactttttttttttttaattcagtataaatagacctacaagtcagctattggaagatatggtaattttgtttgtttgtttgttttttttgagactgagtctcactgtcgcccaggctggatggagtgcagtggcgcaatcttggctcactgcaacctccgcctcccagattccagcaattctcctgcctcagcctcccaagtagctgggattacagatgtgtgccaccacacccggctaatttttgtacttttagtagagacggggttttgccatttttgccaggctggtcccaaacccctgacctcaggtgatctgccctccttggcctcccaaagtactgggattacaggcatgagccaccattcctggccatgattttgttatttttaaaggcactatcatactattttccagaagggctgagccatttataatccttgggacagagcacatgggttgccttttccctctgtgaatggtgtcctctcataaacaaaagtttgttttgtttttgttttcagacagagtctcgctctgtctccatgctagagtacagtggcacgatctcagctcactgcaacctccacctcctgggttcaagtgattctcgtgcctcagtctcccgagtagctggtgttacaggtacgttccaccacacccagctaattttcttatttttagtagagacgggtttcaccatgttgcccaggctggtctcaaactcctggcttcaagtgatttactcgcctcagcctgcgatagtgctgggattacaggcatgaaccaccacgcctgttcacacaaacgtttttatgtttgataaatatttgcctttttgtcacgatttggcaccctggggtttttacctctcaatcttgttgacattcagctttgagcaattcagttacaatttaggctttactacccaagcagagattcccagaatcgtttcttctcatgagtttggtttttttttagttatttataactgtcttattagttagattgatgggcccctcgcaaaatccagttttttgtttgtttctgttgctggtatttagaacgaaatctactttctagatatcatgaaagtttaaacttgggaacagacattttcaaggatacacagcctcaagactcctcatgttaacttttttctgcatgcgaatttacaggactttgttacagcagctactacagatccacactacaaatagacattaggggcagcccagaaagcacatctttctgtgtggattcaccggaaactcatacattttcctattctgctgttcctttaccccatggttaaattgtagcatcggaattgctttatggaagaaagtgagtataggcagcgtaagaggtctgatgaccaagtcatgaaatctttggagtccatagcatcatgagaacttcttgggaatagggtatagatgcccagtgatatcagtctcacccatccttctctacacatatgggatgttttaggactcagtggcctttgaggatgtggctgtgaacttcaccccagacgagtgggctttgctggatccttcccaaaagaatctctaccgagaagtgatgcaagaaaccttgaggaacttggcctctataggtaacggtgacaatattactccctcagtgaattagagaagtgtttctcattcatcagtgctgttgagtaatttggaatatggacaggcaatactttgatgagtaagtgaggcacggttgtagtgtatcatgaacatagaatcaaataatcatttcataattttatactaatccaggcctgtgtatctgcgcctgtattttagggaagaaatggaaagaccagaacattgaaaatgagtacaaaaatcccaggagcaacctaaggtaatctgcactcacaggacaaagcagtgtctctagaaaattttagagtgggaggaaatgttaaaaagaagggaacaaacaaaaaagctgagttccattatatttattcttagaatattttctctaaaaacatgcatttatttgtgacacaggctggacaccatggcttatgcctataatcaaccctttgagaggttcagaccagaggattgcatgagcccaggagtctgaggctgcactgagccatgatgacatcattagactgtagcctgggcaacagggcaagattctcagaaacaaaattaaaagacaaagagtttttgtatgtgtacagtagtttacatggaaatcgtattaagctccatatattttttgataatagatacggctgggccatctggtagaccatgtggtccattcatgttcaaacaattcagacagagtagaaagcctacactttgctggataatgttaaaaatgcaagtgtaagacttgtgaatgaatataaaatcactgataaacccattaaatgtgcttttcatttttcacagaggtcttatggaagagagactctttgaaagtgaaggtcatcagcatggagaaattttgacccaggttctggatgacatgctgaagaagaaaactggagtagaatcatgtgaaaggaatgtgtgtgaggtcagcatgggtcatttatcccttaataagcacaccagagctgacactggacacaagccatatgagtatcaggaatatggacagacgccatataaatgtacatactgtaagaaagccttcagctgtctcccctacttttgcagacatgtaattgcacacactggagaaaaaccctatgaatgtaaggattctgcgaagacatttagtttttccatttattttcatagtcataaaagagctcactctggagggaacccctatgaatgtaaacaatctggaaaaccctttggatgcgcctcagaacttcaaatgcatgcaaggactcagtgtggagaaaccttacaaatgtaagaaatgtgaaaaagcatttaataacttatcttcctttcaaatacatgaaagaatgcacagaggagggaagtatcatgcctgtaagggttctgggaatacataccgtttttctggtttctatcatagacataaaatgcctcatgctggcgggaagttttatggatgtaagaaatgtgggaaagcctttattagtttctgtgcctttcgataccatcaaaggactcacactaaagagaaaccctatgcgtgtaaacaatgtgggaaagcctatatttcttacacttcttttcaatatcatcagttgaatcacactggagcgaaatgctatgagtgtaagcagtgtggcaaaggcttcgatttgcccaattccattcgatatcatgaaatgactcacactggggagaaaccccatgaatgtaagcaatgtgggaaaactttcagatgtgcctcaagcctccgaatacatggaaggactcacactggggagaaaccctatgaatgtaaacagtgtggtaaagtctctcgttattggagcggccttcaggtacatgaagtaactcatattggaaaaaagctttatgaatgtaaggaatgtgggaaatcatactatagttctggttcctttctaaatcataaaaggatccacaccagggagaagtcttatgaatgcaaggaatgtgggaaagcatttggtaatcccatatcctttcaaaaacatgaagggagtcacagaaaatggaagccttatgaatgtaaggaatgtgggaaggtattcagtttttccagttcccttcggagacatgaaaggacacacactgaaaaactctgtgaatgtaaacagcatgggaaaggattttttcatagaagctgtcctagacacatgaagatagacactggagagatacttcataaacgtaagatacgtggaaaagtctttcattctcctagttcatttcaaacatgtgaaagatctcacactagagaaaaacgctataaatgcaagcaatgtggaaaacccttcatttatttcaatgcctttcaacgtcatcaaaggagccacactggagagaacccctatgagtgtaagcaatgtgggaaagcctgtatttcttccactgcttttcagtgtcgtgaattgagtcacactggagcaaaacgctataagtgtaagcagtgtggcaaaggcttcaatttgcccagttccattcgatatcatgaaatgactcacactggagagaaaccctatgaatgtaagcaatgtgggagagctttcagatctgcctcacacctacgaacacatgaaaggactcacattggggagaaaccctatgaatgtaaacagtgtggtaaagtctatcgttactggagtggccttcgaatacatggactaactcatattggaaaaaagccttatgaatttaatgaccgtgggaaatcattctatagttccaatttctttctaaatcataaaagggtccacactagagtgaagacatatgaatgcaaggaatgtgggaaagcatttgataatcctacatcctttcaaaaacatgaagggagtcacagaaaagggaagtcttatgaatgtaaggaatgtgggaaggtattcagtttttcccgttcctttcgtagatatgaaagggcacacactggcgaaaagccctgtgaataaacaatgtgggaaaggatttttcatatcttctgtggagctttgaatgcatgaaaagacagactacagagaaatgctaaatgtaaggcgtgtataaaagcatttagtaatttctcttccttgcttatacatggaaggatgcacactggagagaagccatatgaatgtaagaattgtgggaaagccttcacatctgccaagagccttcaaaatcatggaaggacacacaccggagagaaaccatgtgaatgcaagcaatgtggcaaagctttcatttgttccagttcctgtcagagacatgaagagacacattctgttaatatgcattcagttatcctaattcctttgaaacacagaaaaagagtagggaaaggacctctgagataactgttttctgagttgagaagagctacttgtgaatggacaattaaatctagatgtatttagatctgatacaattcatctgtagccaacctttttttaaatttttttattttttagatggagtcttgctctgtcgcccagactggagtgcagtggcacgatcttggctcactgcaacctccgcctcctgggtttaagcaattctcctgcctcagcctcccaagtagctgggattacaggtaaccgccatcacgcctggctaattttagagatggagtttcaccatgttggccaggctggtctcaaactcctgacctcaagtgatccacccacctcggcctcccaaagtgctgggattacaggcgtgagccactgcgccctgccacctatagccaatcttaatgagatttcataggcacagacaaggaaggttatcagtcacatattagaggcaccacacagggagagcagtgtgtggccacatgcttcagcccattttttctgattctcttgcttgcaaattaagagtattctccaaatcacttgactttccttttctcagagttatagttctccagagatgtcaccagatgattcacattaaaggtacatttccagttgacttttttatttcagatattagtaaatgattaccagagaactaattcaaactgtcatggttggaaatactctgatgctcaactccctaatctatagagtgagttaaggtctatactcttttgcaagcattgttctagtggcagtgaccctgttcatgattcagcctgacatttactatgctgccctgaaaaccaactagatgggagcttgtttctctctgcattgtgtagtgagtggtgtcacccaggactttcatgtgagaaaaagcaccttgcttttaatctgggaattttgagtgttttttgtaatgcctcagtttattcttatttatggttgattatatgtgatttagaacacttgctatttatgtctgatcccacaaatcagcactcactttatttgcaaagcaccaaatttcgtgtaagaggtgtagtaattgggaatgtgaagctaagttacattctttctctttatttacatgtctccctttctataggcctctttttccccccctttttgagacggagtctctgtcgccaggctggagtgcagtggcgcaatctcagctcactgcaacctccgactccctggttcaagcaattctcctgcctcagcctcctgagtagctgggattacaggcatgcaccaccacgcccagctaatttttatatttttagtagagacaaggtttcaccatgttggccaggaaggtcttgatctcctgacctcgtgatctgctcactttggcctcccaaagtgctgggattacaggtgtgagccactgtgccctgcctctataggcttcttaaaccatttactcaaggcatatgtcagaccctggtcaaagtaatacaaaaaaggtatatacaaaaattgtgttaactccaaaaggtggaatgtaactctttgagaactactccaataagtaaactcaggtattatacacatataggaaggagaactgttgccactggtgaattgttcgtagctttcactctcctcatgggtattcatttttaaagaaagtctccctctgtcacccaggttggagagcagtggtgcaatcatagctcactgtagccttgaactcttgggcttctccagcctcagccttctgaagtagctgggaccacaggtgcttgccaccacacttggctaatttttgtattactggtagagatgaggttttgccatgtggcccaggctggtcttgaactcctgtgctcaagcagtctttctgtcacggcttcccaaagtgctgggattatagctgtgaggcattgtgcctggctctgcctcagcctcttcagtagttggaagtacaggcacaggccacctcggctagctaacttttaaaattatttaataatttgtcttttaatagcttttgtagacagtcttactctgtcacgcaggctggtgtgcagtggcaggatcatggctcactgcagcctcgacctccctgggctccggtgatcttcctatctcagtctctcaagtggctgggactacaggcatgtgacacaacacccaggtaatgttcgtattttttgtagttacagggttttgccttgttgttcattctggtctcaaactctgggttgctaacaatcctcccaccttggcatcctgtagtgctggggttacaggcttgagctatggcactcggcctcccaggtagttgttgaaaggcctggcctgaggccaggcgcggtggctcacgcctgtaatcccagcactttgggaggccgaggcaggcggatcacctgaggtcaggagttcgagaccagcctcaacatggagaaaccccatctctactaaaaatacaaaataaccgggagtggtggtgcatgcctgcaatcccagctacttgggaggctgaggcaggagaattgtttgaacctgggaggcggaggttgcagtgagccgagattgcgccattgcactccagcctgggcaacaacagcaaaactccgtctcaaaaaaagaaaaaaaatgaaaggcctggcctgccaatggttcgagtggcctctccccccacccatccacggtccctcccttcaggtaccactgcaaatttgcagagggtaacagaggctgaggccagtatggaggctgcagagggagggaaatggagctcccatgggtgcttcctgggcggcccaacctattctgcatgtggcctccagctgttcagagcagctccaggagtgtggattctgataagccgcagagccctggaaagcaagagactatgtgcagatgtccttggcagggcgctgtcccttctgtggttggacctctggagcctggggccatattcgggaacagtgttttggttctgacatgcatagggtccctggggtcagacggtaatctgtatatatgaagaaaatctgtgaaggtcaggtttggagacagaattgtttgggacctcacctgcagaaacagtttatgaagttgactatttagctcagaagcttagactgtcacctggtaagagtttcctgctggtaaatgtgaaggtctggaaggagggagcatttccacactgtgaggaggggatgggggagtatgagagaaagccttggctatgtctcatcctcagttgccaccccctgaaggacacctgcctctccctcctggtccaatcatgcctgacctggtcttggttcctctctgactctgaggtgacgagattgccctgctggacactgagtctggaattcccagtacacacttgtaaccccaatggagaagaaaggagcaggaacagctctttgagtgaggaaaaagatagtgccctgtctaaaattcgggagcaaatttcactaaaatgaaaatatccaatgaccaagttgtagggagggagctggcccttagatggtggctagaacccctcacttctgctccccaggtccagttacccagggcttctactgtcactctgggatgaggggatgggggcctggacctctgtccaatcaggagtgctggggcggggccctgccaactgtctgtcctgggaaggtggggacgcattcccgctctcaccttggtgaccttgcctactgagattgggatccagtctttcccgctgtgaaagggaccaggtccctacaccacaactgccgtcgctctgtcgcctgcactgtgacctgcactagtcacgggagccctagagagataagccaggacgcctggaaatggtgagtgtttggggccagctacccgaaacccggcaggggctgggtggaaacggccagaaccggctgtgacgggaccccaggccccctgcaggcgacttcagggtttgggacccgagttctggcacatctcggccctcagtctcctcggccgcaaggtggggttgtgccagcagccgggaccttgggcgtcctgtcccgtccctgcctggtgactgcggtcccggagccctctgtgggcagctccgcccccgcaacctcgcgtctgtgcgggggccacacatgacataaggagagtcctgccttgggtgtagggttcgtgtgggaggagctgcggtccctggggcccccagtacgtttttttcctgttaaactgggccgggggtggtggctcacgcctgtaatcccagcactttgggaggccgaggcaggcggatcacgaggtcggaagatcgagaccatcctggctaacatggtgaaaccccgtctctactaaaaatacaaaaaactagccgggtgtggtggcgtgcgcctatactcccagctactcgggaggctgcagcaggagaatggcgtgaacccgggaggcggagcttgcagtgaaccgagatcacgccactgcactccggcctgggcgacacagccagactccgtctcaaaaaaaaaaaaaaaaaaaaaaaaagggagcttctgggttgctgaacacatggcgaggctgggatggtgggacacccagagagagcagggaggctctgtatccccctactccacatcttgctctatcatcctcatctggctgttcagctatatcctttgtaatgtcctttacaatatataggtaaacaaaaaattaaactgaggcactgttaaaaattaaacagtttgaacatatggtgatttatgaatgagaatcacccagtcgtggtttgtggtttgttatcgaaaaatttagaagaattgcattttagttgtgtttcgattccttaggtagaaccttagtgcactacaaacactttggtccaattgctgctcttaatttcttcacactgcctatggggactggtttatccctgcattttcctcatctatgggatacagggtctcaaatcctcaaccctgtgaccccagcctaactcttgtagtaatgttaggaaattttcaatttcttccccaaatctccaaacgttaaccctttttctccaattcacagtattatcaacgatttgttctttattgtagagtatatttcttcatcctttctctcacatcgatgcagtttttaatggttatcattttttcacagggtccatggatgacaatttaaaaatatttgtgttgtttctgaacatttcacataagaggaaagtagagaataatcatgttacacaccagtgaaaaaacccttattttatttatttattttatttttttttgtgagacggagtcttgctctgttgctcaggctgaagtgcagtggtgcagtctcagctcattgcaacctctgcctcctgggttcaggcgattctcttgcctcagcctcccgcgtagctggcatccaccaccacgcccagctaattttggtattttttagtagagacaggatttctccatgttagccaggctggtcttttaactcctgatctcaggtgatctgcccacctcggcctctcaaagtgctgggattacaggggtgagcaactgcacccggcccactgatgtatttcaaacaggttaccttatggtgatattcagtctttatttaaggatatatgacatctttccatttattaccctttactttgatgtctttcagtatatactttttgcataataattattttatatccttcctgagaattttagggatttcaagaaagttaattgtggttgcagtggctcatgcctataattccagcactttgggaggccaaggcaggcaattcacttgaggccaggagttcaagaccactctgggcaacatggcaaaaccttgtctttactaaaaatattaacataaaaattagcagccgggtgcggtggctcactcctgtaatcctagcactttgggaggccaaggcaggaggattgcctgagcttaggagttcaggaccagcctgggcaacacagtgaaacctcatctctactaagatacaaaaacttagccaggcgtggctgtgtgcgcctataatctcagctacttgggaggctgaggcaggagaatcacttgagcccgggaggcagaagttacagtgagccgagatcacgccactgcactccagcctgggagacagaggaagactccgtctcaaaaaaaaaaaaaaaaaattacattcaacgagttgttgctggcaattcaacatgcactgagatttatttctttatagagtttgcattgtagaaactgaaaatattgcatatgcaccaaatacataaaacagttcacaatgaaccaaaatactgatggagccagtattgtaaattataatttccttatgtttcttcatagtttcacaacctgtatgtgtgtatatatgtgtatgtgtctctgtgtgtgtgtgtgtgtatatatatatatatattttttaattttttgtatttttagtagagacagggtttcaccgtgttagccaggatggtctcgatctcttgacctcatgatccgcccgcctcagcctcccaaagtgctgggattacaggcgtgagccactgcacccggccttatttttttattttttaaaaagtactttatggatgggggttatcactattttgctcagggttttctggaattcctagtctgaagcaatcctcttgccttgtctttccaaaatagttagattacaggcatgatacaccatgcctggccactaatttctttttttttttttttttttttttttttgagacggagtctcgctctgtcacccaggctggagtgcagtggcacgatctcggctcactgcaagctccacctcctggattcacgccattctcctgcctcagcctcccgagtagctgggactactggcacccaccaccactcctggctaatttttttttttgtatttttagtagagacgggggtttcatcgtgttagccaggatggtcttgatccgcccgccttggcctcccaaagtgttgggattacatgggtgaggtaccgcacctggccacctggccactaatttctttttttttttctttttttttttttttttttttgatacggagtctcctctgtcacccaggctggagtgcagtggcgggatctcggctcactgcaagctccgccttctgggttcacgccattctcctgcctcagcctcccgagtagctgggactacaggcgcccgccactgcgcccagctagttttttgtatttttagtagagacggggtttcaccgtggtctcgatatcctgacctcatgatccgcctgcctcggccacccaaagtgctgggattacaggcgtgagccaccgcgcccggccttcttttttttgtttttttttttgagacggagtttcactcttgttgcccaggctggagtgcaatggcacgatctcggctccctgcaacctctgcctcccaggttcaggcgattctcctgcctcagcctgagtgtctgggattacaggcgcacaccaccacacctggctaattttgtatttttagtagagacggggttttgccatgttggtcaggctggtcttgaactcctgacctcaggtgatccacctacctcagcttcccaaaatgctgggattacaggtgtgagccaccgcacccggccactaatttcttttttttttttttttttttctttgagacggagtctcactctttttgcccaggctggagtgcaatggtgcaatctcagctcactgcaacttccgcctcctgggttcaagcgattctcctgtctcagcctctcaagtagctgggattaaaggcgtccaccaccacgctcggctaattttttgtatttttagtaaagatgaggattgtggccaggctggttccgaactcctgacctcaaatgatccacccgccttggcctcccaaaatgcgaggatttcaggtgtgagccactgtatctggccactaatttctttttatcactgaataatttattgaaaagttcatcttgagctgggcttggtgccttatgcctgaattgccagctatatgggaagctgaggtaggaggattgcttgaggccagaagttggagatcagcctggtagatacagtgagatcccccatgtcttggggaaaaaaaaatttgctcatcttgtctgactttagtttttgggaaatatggataaggctgctgaaaacgtctttgtgaggacttttctggggacatgagctttcaattcattggggtcaatatgtagtagggttactgatgaatcatgtggtaagaccatgcttatcttcagagctcaccagactgtcttacagagtgactgtagaatattccattcacatcaacagtgaatgggagttcctgtggcttcccttttttttttttttttttgagatggggtctcgctctgttgcccaggctagagtgcagtggtgcgatcttggctcactgcaacctccaccttctgggttcaagcattctcctgctcaacctcccaagtagctggaattacaggcactcgcccagctaatttttgtatttttagtagagatgagtttcaccatgttaggcaggctggtctcaaactcctgacctcaggtgatccacctgcctcagcctcctaaagtgctgggattacaggcgtgagtcactgtacccagcctgcctatctttaatcaactagtttatttcatacaataatcaatcattattataaaaaacataaaatttaccagcttaaacagtttgatgtatacagttgaattagcttgagaactctacataacatctaatatgaattatacttattttttttttggctactggctttttacaattatagcatcctgtctgaggtttcatgcatgttgcagcaggggccaggatgttattttccaagactgaacaatatcctgttgtatttatatgcttaccatatttaggttatccatttagcctctcagtgggtatgtgcattggtccacctcttagctattgtgaaaaatgcttttcaaatatgtcttcaagatcaggctttacatggcaacagcagactctggggattacttgagataggagaaagggagaagggcaagtgttgaaatactactgggtactatgctgtgtacctgggtaacaggatcatttgtactgcagagctcgaaatctgaaagtgctggaattacaggcatgagccaccatgcccagccctgttctttggtttttaaaattcaagtagacgttgggcacagcagctggctatagtgttagcttcttgaaaggctgaagtggaaaaatcgccgtagcccagggattggaggatttagtgcaccatgatctcacctgtgaatagctactgcactccaacctgggttacatagcaagactctgtctctaaaaaaaggaaaaaaaaagccaggcgcagtggctcatgcctgcaatcccagcactttgggaggccaaggcaggtggatcacctgaggtcaggagtttgagaccagcctggccaacattgtgaaaccccatctctactaaaagtacaaaaaattaggtgggtgtggtggcaggtgcctgtaatcccagctactcggaaggctgaggcaggagaatcacttgaacttgagaggcaggggttgtggtgagccaagatcgcgccattgcaccccagcctaagccacaagagcgagactccttctcaaaaaaaaaaaaaagattctaattgtttcttttacattactgatttgaactaatgaaaaaaaagtttaaagtttgttaaacaataaaagtgaatttgatttagaattctgactgaggactataggcaaatatccataacctgggagcagttccgtctcactgctcctatgcagtattttggttcagctcatgtatagatggtgaggattcattatgtgaaaaatcacatctaagtttgggtgcaagagtacatctggccatagttcagagaggcataatcactaaccccatcagatattatcttatgtgttacaaaattagctaatttctcagaccaaaccccactttgaatgattgccctcattactcatttgggtcctggaggtccacattcttttgtttttttttttttttttttttttgagacggagtctcgctctgttgcccaggctggagtgcagtggcacgatctcagctcactgcaagctccgcctccaaggttcacgccattctcctgcctcagcctcccaagtagctgggactacaggcgcccgccaccacgcccagctaatttttttatttttagtagagacgaggtttcaccgtgtcagccaggagggtctcgatctcctgacctcgtgatccgcccacctcggcctcccaaagcgctgggattacaggcgtgggccaccgcgcctggtggaggtccacattctttacctaccctgccgtgtggccccggaagctgacttccaagtaccacagcagtcaggttcccatagcctctggctttcggttggcccagttcatgggaggtgctgccaggaaagcaggtaataggagagaaaatcaggatctctagtccattggctgccaccctgctgtcctgagaggttggcagtcatcctttcctctgctcctgctgaatggccctctactaaagctcagggtgttcctggggtctcataacagctctgtcttgtctctgcctcaggcctagtgatgtgctttgctccctgctgttggtggactgctcctcttgtgggtatatcacaggctccctgtaatgctattggttctgtattttaaataataatttctctcacttaactacacttttgagtgttacactcttccttcctgatctatgtccaaaacagaagtctcaataacatgcaaagatgcagtgtgttaagcaaaagtggaagataacgagaccatttcaggtagattcatatgctgcagtcctacaatggtgtatggttaacataggaaaatgaggccattggggtgacttagctcaggttgtgctaatgaaatgccatgggctgagcttctcaaacagcgacattattttttattttttaaacatttctccagcatgagatatctaaaatctagctgccaggcaatatgattcctggtaaagaccaagttcctggctgggatatagacaccttcttgctataccctcatatggaagaaagagtgagtgttttctccctctctcttcccgcccgccttggctttccaaagtgttgggattacaggtgtgaggcactgtgcccagccttcgttggaagtcactaatgccaccattagagtccaaccttgtgaccttatgtaacccgaattatttccttaagtgctcatcttcaaatgacatcatgttggggtatagagattcaaagtatgaatttggtgggtgactaaattcaatacacagcaagggtacaagaaagaagttcataaaaggggctttggacccatgcatgcagatctgactgtacagattgccagatggtgagcatgttcaatggagagaggtcacagatagctatatattagcatgtaggggccaggggcagtggcttatgcctgtaatcctagcactttgggaggccaaggtgagcagatcacttaaggtcaggagtttgataccagcctggccaatatggagaaaccccatctctcctaaaaataccaaaaattagccaggcgtggtggcacatgcctgtagtcccagctactcaggaggttgagacatgagaatcgcctgaacccggggtgggagaggttgcagtaagccgagattgtaccactgcattccagcctgggcgacagagtgacactctgtctcaaaaaaaaaaaaaaaaatacacacacacacacacaaaacagactgggcacggtggctaacaccagaagtcccagcactttgggaggcgcagtcaagcggatcacctgaggtcaggagttggagaccagcctggctaacatggtgaatgaaaccctgtctctactaaaaatacaaaacaattagtcaggcatggtggcactcacctgtaatcccagctacttgggaagctgagacaggaaaatcaattgaatctgggaggcggaggttgcagtgagccgagatcacgccattgcactccagcctgggcgacaagagcaaaactccctctaaaaaaaaccacaaaaacaaaaacttatgctgggacaaaagtcatgatcaaggactgttcttgggaaaccagaatatatggttagataatttttttctttttttctttttttgagacagtctcgttctgtcacccaggctggagtgcagtggtgcgatcctggctcactgcttacctccgcctcccaggttcaagcgattctcctgcctcagcttcctcagtagctgagactacgggtttgtgcctggctaatttttgtatttttagtagagacagtgttttgccatgttggccaggctgctctcaaactcctgacctctggtgattgcctacctcggcctcccgaagtgctgggattacaggtgtgagccactgcacccagcctggtcagataacttctgagacagttttgtacttttatgagggtaggtaatgtgggaaatgcattagagcagcagtccccaacctttttggcaccagggaccagtttcgtgggagaaaagtttttcacagaggagggtggggagatggtttttggatgaaactgtttcacctcagctcatcagggattagtttctcataaggagcatgcaacctagatctctcacatgtgcagttcacaatagggttatcaacccaagaaaatctaataccactgctgctctgacaggaggcagagcttaggcagtaacgctcactcgcttctgcttacctcccgctgtgtggcctagttcctaacaggccatggacaggtacccgtctgtacccgagagttggggacacgtgaattagaggacactcaggtggtgttcagtggagaatggatggcttgtttgctgtgtgagaaaatcttccacatatttggtcatagagatattgcattgtgtgaatgcacaggaaaaacattttgagtttttccactcttagatccctgtgcaattttgagaaatccagtcacaacagtgtgtggatgttaatgccgcccttaccacaagagggagcttcattgacgttgcctttctggaaaatggttcaaaggactttgttggaaattctactctactctactctactgtatttatgttatgttatgttgttatgttatgttatgttatgttatgttatgttatgttatgttatgttatgttattttagagacaaggtcttgctctgttgcccaggctggagtgcagtgttgcagtctcagctcactgcaacctctgcctcccaggttcaagtgattctcctgcttcagcctcccgagtagctgggattacaggtggccaccaccccagccggctaatttttgtacttttagtagagacagggtttcactatgttggccaggctggtctagaactcctgacctcaagtgatccgcccgccttggcctcccaaagtgctgggattataggcataagccgccgtgcctggcccctgaaatactttttaatatagggtgtaagccaggcgcggtggctcacatctgtaatacaaatacaaatacaaaaattaaccaggtgtggtagtgcgtgcctgtaatcccagctactcgggaggctgaggcaggagaattgcttgaacccagcaggtgaaggttgcagtgagctgagatcgcaccactgcactcaagcctggcgacagagcgagactctgtctcaaaaaaaaaaaaagtgtgtaacagttggtgaaaaggttcaaaaaaaaaaagaaaagaaaagaaaggtgacacttaaatttacatgacttttttttttttttttttgagacagcgtcttgctctgtcacccaggctggagtgcagtggcacaatcttggctcaatgcaagctctgcctcccaggttcatgccattctcctgcctcagcctcctgagtagctgggactacgggcgcccgccaccacgcccggctaattttttgtatttttagtagagacagggtttcaccatgttagccaggatggtctcgatctcctgacctcgtgatctgtctaccttggcctcccaaagtgctgggataacaggcgtgagccaccgcacccagcctacatgacttaactttttaccttgttaaacagagagcaatcaaccctgtgaacgttatgttccagattctgacaagtgtgttgaaaaaattctacacactaaatgaaataggagtaatgggtgagagagtgtgaccttgagtttcaagttggggtaaggggggcggaaaagaagacagtgtcttgaggtggtgacatctgtagtgagatctgaaatgacgtgttagtatatgaagtcaggaaagaggattctgggaagatggcagaataggaagtatcaagcagaaactacaggaagccatttttgtgaactgagttcctctgctgggccctcagaaaccagacctaccccagcgattaggaaattacacctaggcaatcgtcattgccccacacgctacaaagaacgttcagtagacaatggcttgagaaatgcgcccagtccaatctttgggtaagccaggtgcagagatgtacaaaaagactgtccttggcaaagttctatggtcacatgatgtttgaggcagttctgcatatcatatgagggccttattggagttcttgtgtatctctgccaagagagtactgcacagcagaggtcattattgcaacttccgtgccatttatttattttgagacagagtcttgctcttttgccaggctgaagtgcagtggcacgatctcagctcactgcagtctctgcctcccgggttcaagggattcctctgcctcagcctcctgagtagctgggactataggagcccgccaccacgcccggctaattttttgtattttagtagagacaggtttcaccatgttggccagaatggtctcaatctcctgacttcatgatccgcccgcctcggcctcccaaagtgccgggattacaggcatgagccactgcacccagccacttctgtgccatttaattgttcaccagttgccacaggtctatctgtgtacacctgagttgcttgagtggttctaaacaaatgaatttaactttcattgtggtgttgaatttttgtatataccttttatgaattattttgaccgtgggctgaccaatatcatgagtaaaagatttaaaaggtctagaggagccaggcatgttggctcatgcctataatcccagcactttgggaggccgaggcagatggatcgcttgaggccaggagtttagagaccagtctggccaacatggtgaaactccaattctacaaaaaacacaaaaattaactgggcatggtggtgttcgcctgtagtgccagctacttgggaggttgtgacgagacttgcttgaacctgggaagcagaggttgcagtgagctgagatcgtgccactgcaattcagcctaggcaacagagcgacactctgtctcaaaaaaaaaaaaaaaaaagccataggtaggaagcaaaatgtaaataatgagaaaaatatatatcttaagttcacatttgaaatatgtaagaaaatttggtgatgctgcaaataaactgaggattgtaattatataaattacaagtttttcctgagaaaaaacacattttcaacctaagtacattgatcttaaaggatttttcctttgctttttgaccttgctttgtgaaaaagtgcaaaaataagacatgaatagtcaaaataagaatttttgggccaggcgtggtggctcacacttataatcccagcactttgggaggccgaggtgggcggatcacgaggccaggagatcgagaccatcctggctaacatggtgaaaccctgtctctactaaaaaaaaaaatacaaaaaaatagccaggcgtggtggcgggcacctgtagtcccagctactcgggaagctgaggcaggagaatggcgtgaaccagggaggcggaggcttgcagtgagccgagatcgcgccactgccctccagcctgggcaacagagcaagactccatctcaaaaaaaaaaaaaggaatttttggccaggcatggtggctcacacctgtaatcctggcactttgggaggccgaggcaggtggatcacatgaggtcaggagtttgagaccagcctggccaacatggtgaaaccctgtctactaaaaatacaaaaaaatagccaggcatggtggcaggtgcctgtaattccagctacttgggaggctgaggcaggagaatcacttgaccccaggaggcagaggttgcggtgagccaagattgcaccactgtcctccagactctgtctccaaaaaaaaaaaattcatatctcacaaatcaaggtattttccatatgtcatcacacatagttaaggtttggtcagtcagtgattgcttctatgtctgctgggactgggatttttactctagggagactgaaataagcttttgtgaagagaagcacccatgacaccttaaaggaaatgatcggattgttccatgcatgacttttccacgatgtcattagcttcataatattagcataagagggttcctgacaagtttgcatcaacagcatgttaccagagaaagaaagacttgattggaatagtgatgctgactttgttctttactgggcaggaaattcagttttcaaaaacatattggccccataggactcaaggtgatttttttaaaaaagtagtagccaattgtggtggctcatgtctgtaatcccagaacttggggagatggagacagaagaatcacatgatccagcagtcaatgaccagcctgggaaacagggagactccatctctacaaaaaataaataaataaaatcatagtatataccttgataagaagtgaatttatagattttaactgaggtatgttatggttaacaatgtccataaattgtagggaatatatcagggtttagagaatagtatggtaaaaactggtccagaagtctgatggctggcctcccctcgccagaaggccgagtcttttgcccctgaacaggcacatgtcatacacctgcaatgtgagatgatgctcttcagtgaccatgatggatcaatacaaaaataactaattcttggcagggcacagtggctcatgcctgtaatcccagcactttgggaggccgaggcgggtggatcacgaagtcaggagatcgagaccatggtgaaaccctgtctctactaaaaatacaaaaaattagccaggcgcggtggcgggcacctgtagtcccagttacttgggaggttgaggcaggagaatggcgtgaaccaggaagcggagcttgcaatgagccgagatcgagtcactgcactccagcctgggcgacagagcaagactccgtctcaaaaaaaaaaaaattaaaataaaaaaaaacctcattctttaaccatgtcttgaaatgtgacagaagaaaacactttaaattgcaaacataccccaaatttttctcttctcacgaaatgtgactatcttttaatatctcacacatctcacagtcatctatggcttttggtcatattcattaccacagtatattattacaccctctttgacgacacttatgccactggtggtctttggtcagaagtcactcataagaacatgagatcacctttggtatttagaatagatgaaaattcatgatccagataaaaactaagaatataagcatgaaaagtaaaatctacatgaggaaaaatatgcctgacatccacatggcaacactgactcacagtgaccaccggataacatggtaacattatcaacttgatctaatacatgatgttaatgggaggttgtaatgtagcttcttcattaaaaaataataattgttagtatgcagttgttataaacagttaataagcttatttctaaaatacatgaacagaagtatttgttgccaagaaaccgcattagtgtttttagtcaggtatactcatacaaagttaaaaacgaagtgagacattacattcagttgtgaataacagcaaatgcttgaaatttcctgataagagcaaggtggctcttctcacataaaagcccttggtgagaccaatcactgcacaatgcagcagaggaacaagctcccatctagttggtttaatcaagaacaggctcgctaatccgtagaaacaacaatgcttgcaatacaaagtagacctcttaaaccaactcaatctatagaagagttgggcatcagtgagtatttccagccataacaacatttattagttctctggtaaacattttaacatttctgaagaaacagcaaagtgggcatgtatctttaatgtggagcactggggacatatctggagacctacaactctgaggaacagagacaagtgatttgggggatattctcgattaacaagccaaagaatcaggaaaatgggctggaagcgggtagccacacacctctctccctgtgtggggcctctaatatgtgactgatgccttccttttctgtgcctttgaaatctcatgcaagattggctataggtgaattgtattacgaaaccatccaagttcttctagattttattgtcctatcgcaagtctctcttctcaattcaaaaagcagttatccagaggttctttcaccactctcttttcttgtgtttcaaaggaagtgggacaacagaaagcttctcccgttgcttccactaaaaggatttctcatctattaatggtatgagttctttcatgttctcgacatgaactggcacgaataaaggctttgccacattgcttgcattgatagggtttctctccagtgtgagtcctttcatgatatcgaatgtaattggaaataaaggccttaccacagtgcttacattcatagggtttctctccagtgtgagtcctttcatgatatcgaatggaactggaacaagtgaaggctttgccacataccttacactcatatggcttatctccagtgtgtgtcctttcatgtatatgcaaggaagagaaatacctgaatgcttttccacattgcttacattcatggggcttctctccagtgtgcgtcctttcatgtatacgcaaggaagaaaaatacttgaatacttttccacattccttacattcatggggtttctctccactgtgcgtcctttcatgaatttgaagttgtgaagcacatctaaagcctttcccacactgcttacatccatagggtttatcctcagtgtgtgtcttttcatgcctttgaaggtccgaggtacatctgaaggctttaccacattgcctacattcatagggtttctctccagtgtgagtccttccatgcttttgaaggtgtgagccacatctaaaggctttcccacactgcttacattcatagggtttctctccagtgtgagtcatcttatgatactgaatggaactgaaagaaatgaagactttcccacattgcttacactcatagggtttttctccagtgtgagaccttttatgtctacgaatttcactaggaaaactgaatgcattcccacattctttacattcatcggcattcactcctgtgtgagttctttcatgtactggaagggtagtggaacgagtaaaggccttaccacattgtttacacttatatggtttcacaccagtgtgaattcgttcatggataagacataaattgagaaaatagaaggctttcccacaaaacttacatttataaggtccatctccactgtgcattaccctgtgtctttgaatgcatgaatgggaaatgaaggtttctgtacattctttaccatcatagggtttctctttagtgcaagctttatcatgtgattgaaaggagtcaagataactgaaggctttcttacattccttatttctatatggattctctccatattcctgatactcagatgacttgtgtccagtgtcagctctgatatgcgtattaagagatgaatgacccgtgccaacttctccacacacactgctttcacatggtgttattccaggaagagttttcctgttcagcatgtcatctgcaatctggttgaagctttctccacagtgatgactttctttactttcacagagtttctctctcataagacttcagtgaaaaatgagaagcacattattaacggtttgattaaaagtgacttatagggccgggcacagtggctcactcctgtaatcccagcactttgggaggctgaggtgggcagatcacctgaggtcaggagtttgagaccatcctggccaacatggtgaaaccccgtctctactaaaaatgcaaaaattagctgggcgtggtggcaggtgcctgtaatcccagctactcgggagcctgagttgggagaatcgcctgaaccccagaggcagaggttgcagtgagctgagattgcgccattgtgctctagcctgggtgacaagggcgaaactctgtctcaaaaaaaaataaaaaaataaaaaagtgatctatattggctgggtatggtgggtcacgcctgtaatcccagcaccatgggaggttgaggcgggcagatggcttgaggccaggagtttgagatcagcctggccaacatggcgaaaccctgtctctactaaaaatacaaaaattggctaggtgtgacggcgtgcgcttgtaatcccaactacttgggatgctaaggcacgagaatacctcgaacccaagcagtggcagttgcagtgagctaaaaccacaccactccactcccgcctgggtgacacagcgagactcttgtctcaaaaaagaagaaaaaaacatgatttatatcattaacaactattgcacttgcattgttaacactgcccggcaaagtgtcagctttctgctctgtctgaatcatttgaatattaatggactatatgctctacaagatggtctgggtatatatatttttttaaaattagtatttctatggggctttgtaatcctattttcaagtaaactattttacaaatactaaacatgtgcgtctttttttttgagttggggtctcaactcaccctgttgtccaaattggagtgtagtggtaccaacatggctcactgcagcctcaaactcctggcctccagcaatcctttggtctgaaagccccaaaggactggcatttgggggtatgcgcaacagtgcccagcccagcgtatgttacatttaaacatatgtttttaggaaaactttctatgaatacataaatttgatactgggcttatttcttttgcttctttttaacattttctcactttttttttttttttgagacggagtctcgctctgtcacccaggctggagtgcagtggtgcgatctcggctcactgcaagctctgcctcccagattcaagcaattctcctgcctcagcctcccaagtagctgggactacaggcatgtgccaccacgcccagctaatttttttgtatttttagtagagacagggtttcaccatattggccgggctggtctcgaactcctgaccttgggattcacccacctcgacctcccaaagtgctgggattacaggcgtgagccactgtacccggcctattttctcacattttaagattttctagaggcattgccttgtcttgcgagagaaaattaccttagatttctcctgggatttttgtactcatcttcaatgttctgaactttccatgtttttcctaaaacacagacccggagaaaacacagatccagaattagtatgaatttatttaaaaatcattagattctgtattcatggtacatggtagccatgcctgatttattcatcaaagtattttttgtccatgttccaaatcaatgaacagcattgatgagctagaagcatttgttctctaattcactgggaagtaatattgtcattcttacctacagaggtcaggttcttgaaggtttcctgcatcacatccctgtagagattcttctgggaaggatccagcaaagcccactcctcctgggtgaagctgacagccacatcctcaaaggccactgaatcctgaaacatctcacatatataaaagaggacaggtaagactaacagccctggaggcctatactttattcctaagaagttctcatgatactgtggactccaaacatttatcccatgacttggtcatcacacctcttactttctgtctatactcacgtcctcccacaaaccaaccctttttttgttaagagagagggtctttggccagtcgcggtggctcacgcctgtaatcccagcactttgggaggctgaggcaggcagatcacttgaggtcaggagtttgagaccagcctggccaacatggagaaacccgtccctactaaaaatataaaaatcagccaggcgtggtggtgggtgcctgtagtcccagctactcgggaggctgaggtaggagaattacttgaacccaggaggtagaggttacagtgggccgagatcgcgtcactgcactccggcctgggcgacaaagcaatactccatctcaaaaaaataataataaaataaataggccaggcgcagtggctcatgcctataatcccagcactttgggaggccaaggtgggcggatcacctgaggtcgggagttcgaaaccagcctgaccaacatggagaaaccctgtctctattaaaaaaaaaaatacacaattagctgggcatgttggcacatgcctgtaatcccagctacttgggaggctgaggcaggagaatcacttgaacccgggaggcagagattgcggtgagctgagattgcaccattgcactccagcctgggcaacaagagtgaaactccgtctcgaaaaaataaaataaaataaaataaataaaatctatactaatcaagagaaaatggtattaacagatggaaagatagactaatggaaaacagcagattctgaaaatagtgaaaccacgacaaagcaggtatcaccagccaattatgcaagtggtcctcacttaccagaaggaacagggacagatggttacctacaggagaacaaacaatctttgaagcccatcatctccatatgaattaattctagagttgcctgttaccgtgacttcttatgttaccttaccatgcattttcattatgggtttcactttcttataacagaagaaacccgtactcaagccgtgtgtagtggctcatgcctgtaatcccagcactttgggaggccaaggcaggccaatcacttcaggtgaggagttcaagaccagtctggccaacatggtgaaactccctctctactaaaaaacacaaaaattagccgggtgtgtgcgtgcctgtaatcccagctactcgggaggctgaggcaggagaatcgcttgaactcgggaagcggcggttgcagtgagctgagagagcgccacttcactccagcctgggcgacagaaagagactgtctcagaaaaaaaaaaaaaaaagaagaagaagaaagctgcacttgacctcaacagtttccagttatccacctcctcccagttcctgcatgtgctcaacccacatatgtgacttacacagctgcctcctggtgacgacctcactgtggaaaagctagacagaccaacttgacttgccccactgacccttatacccacgtggatggcacagaccacctgttaatcacagcctgacttcacagaactagcacctgcttgctccaaatctatcagaaacaactccctaagagaaacctccttgggcattgccctggaccccaagaaaaactctggcccaaaagtccctgtctgtctttctccccacctgctggttgaatgtgcatcctggatgttccccccactctgtgttgccctgcaaggtgtgctgccctcatctgtctgggatgtgataatgcactgttatgtcatggctttatggctttgttgagatgactctgctgtggctcacttcacctacacctttcccttaatagcaacatccaactggctgaccagctatgtgtctccaaataatggaagctgggactgggggagaaaaactgagcatcccaaggggttggctatctagatgaagagtgtaccaggagtctcctcccatttgggaaattcagttgctcctttgggagatcccacaccctgcctcaggctatcctctgggaggactgacacaggggctgatattcagtaggccaggagagatgggagctgtgggcattttggttcagccccaggcggttctgaaacccaggaccaggaaaagatagattgggactcctgaagacacatcaccctgtaaagttttcaaaaaggaaacaggccaggcacggtggctcacgcctgtaaaattccagcactttgggaggctgaggcaggcagatcatttgagctcaggagttcgagaccagcctgaccaacatggtgaaaccccatctctacttaaaatacatggggtatggtggcgcatacctgtaaacccagctactcgggagactgagggcaggagaatcacctgaacctgggaggcggaggttgcagtgagccaagaccacgccacttcaattcagcctgggttacaaagagagactttctctcaaaaaaaaaaaaaaaaaaggaaacaacccaaagacattctgagatggtgtctgtgccttacgaagataagaggagaggaacagaggtttttcactggagtatcaagtggttattctctattctatgtgaaatgttcagaaacagaacacaaatattttaaaaaaagttatccatgaccttgtgaaaagatgataaaccactaaaatactgcatctatgtgaaagaaaggatgaagaaatatactctacaataaagaaagttgatacaggaggctgaggcaggagaatcacttgaacccgggaggcagaggttgcaatgagccaagatcatgccattgcattccagcctgggcaacaagagcgaaactccgtctcaaaaaaaaaagaaagttgataatactgtgagttggagaaggggagttaatgtttggagatgcggaaaagtaattgaaaatttaagatgttactgcaaactgctgaagagttagggcggggtagcagggtggaggatttgagacccatacattaggaaaatgcaggaggaagccagtccctatagacagtgtgaaaaaatttaaagcagcagcaattagactgaagtgtgtttagtgctataagaaactacctaaggacaccaaaatcaaactcaaattgaggcaggaaaatagggtctggacgcagggaacataaggcctattcaaacttcagctatgaaaggaaatacctactccatagggcgtaagccaagtaaatgattttataaccttacttcatcctctccttttacatagagtataccccaagtaaccaatggaatcctccagggggtatttaaactcccaaaaattctgtaacggggcctttgagcccctgtgctcagccccgcttgcacactgtggagtgttaaatcccttcattccttccttgctttgtgcgttttgtccaattctttgttcaagacgccaagaacctggaccccctccaccgttaacaaaatgcaattcttcttaaaactttctggtaccaaaaccacaaatcatgactgggcgtttctcactcatgaatcgctgtttgctcaaactctttaaatttttttttttttttgagatggaatctcgctctgtcccctaggttggagtgcagtggcgtgatctcggctcactgcaaccttcgtctcctggggtcatgcgattctcctgcttcagcctcctgagtagcggggactacaggcgcatgccaccatgcccggctaattttttgtatttttagtagagacggggtttcactgtgttagcctggatggtctcgatctcctgacttcgtgatccgcaagcctcggcctcccaaagtgctgggattacaagcatggtccaccgcgcccggcccaaactctttaacagaaaaaaaaatccgcaggattcccccatgaccctcccgtggtccccgcaaaatctgaagagacgcggggctgcaggcgcggagctgcccagagagggctccagggtcggggcccacagtcgcccgcgcaggaacagaacaggaggacgcccggggtcccggctgccggcccagccgcaccctgcggccgaggggacgcagggacgagctgagacagagggattcgggtcccagatccaggaggcgcggcgaggaggcccagatcccaccacagccgcttccggccggttccacccagcccctcccccgtctggggactccggccccatacactcaccatttcccggcttctgggtgtcccggtgtcctctctagggctcccgtgaatagtgcgggtcacggtgcaggcggcagagcgacagaagttgtggcagagggacccggggcctctcggagtaggaaatctggtatcccgacaacaacctgcatagcaacaaaagtagaagctggaatgggcctcctccttccggacggaccgttggccgggctccgccccggcgcttctgattggacaaggtacaaggccccgccccctcagaactgagtgacggcagaagccctgggtaacgagccctgcaaagccggactgatcggttctagccacagcttctctctaagggacaactccttccctgagccctggtcattggatattttcttttcagccaaatttgctcctgatttttacacagggcactatcttcttcctcattcaatgggctgtcagtgcttcttcgtcctgcacagggttgtaagtgtgtgcagggaattccagactgagtgtccaatggagcgatgtgctgacctcagagcaggaaggggagcccagatcaggccaggcacgactgcaccaagaaggagaggcagttgtccttcaggggcccggaattagggatgagacatggccaaggctttcacacatctcaccccacctcacagtgtggaaactctccctccttccagaccttcatcttcatcggcagaaaactctcacttggtgattttaagcttctgacctaaataaactgtcaactgcataagccccttctccaggagaggtcccaaacagttatttccctgaacttgatctttacggattttcttcagatatgcaaattacagtctgaccccagggactctatgcatgtcaaacccaaaacactgctcccgaaaaccgccccagattccagatgtacagccgcagaaaggacagaactcctgaagtgcacctgcacgtgggtctcctgctttccagggcgctgcagcatgtcagaacccacactctttctggatctgctctgagcagctgcaagccacctgcaggggagggcggctgcccaggaagcacccagaactccacttcactccttggcaggatccatactagcctcagcgtcccgtccctggcgtcggtctctgctgccccctgcaggttattcacctgcttctcacatcattcatcagtttccatgagacaaacatcctcaatcccactgcgagaataacacacgagcaaagctctcctccagtgtgtatgtataaagtcgaggaggaagtgtccaagattatttaactgcatgaaagtgaggcagtagtggctgggcgctgtggctcaagcctgtaatcccagcactttgggagggcgaggtggctggatcacctgagatcaggagttggagaccagcgtgaccaacatggtgaaatcccgtctctactaaaaatacaaaaattagccgggtgtggtagagcccacctgtaatcccagctactcgggagactgaggcagaagaatcgtttgtatcaaagaggctgaggttgcagagagccgagattgcaccactgcactacagcctgggcaatagagcgagactctgtctcaaaacaaaacaaaaaaacacacaaatgtttagtcatgttacttatttctggtttccagcctgactttataacattcctgactctgggactctccagctctccagaattatgctttgaagaaaaaacaagatagagcacagggcccacatgtctcttataaactgtgaaccaaaatattacatagcagccatctgtcagaactgcttccaggctattgtcctcagtcacaatcctaaatcaaactcactttctttaacaaatttaattttttttcttcagtccacatgagtaatctaaaagaaacacatagacagaagaatctctttattatcatctttctaccaagtcaacatcaagcattaaaaaaatgtaaaacaaagtgaaaaccatccttctctgattcatcgtagacccagaatctgccagtcaccaacacctatcttcattttctctattacggccaacttttatctaagagatatcataggggcatatttaatagagtttgtcattttgtgttttatgaattttagaggtttttttgttttgttttgttttgaacttttatttgcattttcttttggctgaatttgtttgtctcttaagtttatgtttcttctggggtatctttttcttccgtgcatcctccttttctgcttttggaacaaggtgtttcttttcactaagcatcatctggatgtggcaggggagtttgtggatgggttcatctgcccatgagttctgtaagtcaggtggtacattatgggtgccttttccctggatgtgctcaataaccagggaatctacatctatacccttaagttcagcataactctgcacttgtaagcaaatttcagtaccttttcggggccactgatggtgagtccagccccaatgtctgtcttgcgtacagcgaccaactccactttctaagactgaaatggtacacataatttctgtaaaagaaaatatttcagatacttggtggcttttcatataggcatacctgtgatggcctgagcaccttcacagtttacagtgaacatgagggtttcatccttctaacatgcacgacttcgtgggattttctgggtcatagtgaataatgttcatagatcaactcaggccacacaagaggacaggttttctttggtctttaaaaggaactgattaaagaaaaaaaaaaaaaaaaggtggaagccaggcacagcagctggtacctgtagtgacagctacttggcaggctgaggtagaaggattgtgagcccaggaatatgaagctctcatgcactaagatcacacttgtgaatatcactgcactccagccgggtccaaacagcaagaccaactctctaaaaaaaaattacataataaaataatttaaaaaaaagtttgtggttagaaaaaagtttttatttaagacattcattaaagaaaaaagtactttgagaagagattagggccaggcgtggtgcctataatcccagcactttgggagcccaaggtggcagatcatgaggtcaagagattgagaccatcctggccaacatggtgaaaccccatctctactaaaaatacaaaaattagctgggcgtggtggcgcatgcctgtagtcccagctactcaggaggctgaggcaggagaatctcttgaacctgggaggcggaggttgcagtgagccaagattgcaccactgcactccagcctggccacagaacaagactctgtctcaaaaaaaaaaaaagatattaggcctggcgcagtagctcacacctgtaagcccagcattttgggaggctgaggcaggtgggtcacttgaggtcaggagttcaagaccagcttggccaacatggagaaacccgtctctactaaaaatacaaaaatggccgggcgcagtggctaacgcctgtaatcccagcactttgggaggccaaggcaggtggatcacctgaggtcagaagttcgagaccagcctggtcaacatggtgaaaccctgtctctactaaaaatacaaaaattagctgggtgtgggggcacacgcctatagtcccagctactcaggaggctgagaaaggagaatcgcttgaacctgggagttggaggctgcagtgagccgacagcacaccactgcactccaacctggagcaagactctgtatcaaaaaaaaaaaaaaaaaaaatttgaaggctggaaaaagattagaaggccgggtgcagtggctcacacctgtaatcccagcactttgggagacactggtgtgggtcacttgaggtcaggagtttaagaccagtctgaccaacatggtgaaatcctgtctctactaaaaatataaaaaattagcctagcgtggtggtgggtgcccgtaatcccagctacccgggaagccaggaggtggaagttgcactgagccgagctcacaccaacacactccagcctgggcaacagagtgagactctgtctcaaaaaaaaaaaaaaaaaaaaaaaaaaaaaaaaaaaagagtttagaggctgggcatggtggctcatgcctgtaaagccagctactcgggagactgaggcagaagaatcgcttgaacccaggaggcagaggttgcagtgggctgagaatgtgcaactgcactccagcctgggagacagagcccgactctgtctcaaaaaaaaaaaaaaagaaaactcgtgagaacgaatggcataaaatacgtagtgtacccgatagccagccatttattataggatatttttgaataggaactttagccttttgttttgataaagctttctgaggcagtgagtctgacaatggcacttccgttatccctttagtgagtttcttaaaatgagggcttgccacttaggtattgggctttcaataggagggaaaagatttttctgaccttcctgtatatatatacctgccactttgctgggctaaccttattattattattattattttgagacggagtctcactctgtcacccaggctggagtgcagtggcgcaatcttagctcactgcaacctccacctcctgtattcaagcaattctcctgcctcagcctcctgagtagctgggactacaggcgccaccacacctggctaatttttgtattttttagtagagatggggtttcaccatattgaccaggctggtctcgaactactgacctcgtggtccgcctgcctcggcctcccaaagtgctgggattataggcatgagccactgcacccggccaaacctcgtattttttttatgacagaactgtcttaaggtcttactggaggtgtgtctctcttaagagttatttccaactctgtgtcctaggtatctgagtgaggccccagctaaactactcccaaaaatttttgctcctgggctactggcatttatttctgaatgctgtcaaatgacagtgactgcagaagcttcagaataattttgcgatggttcccatgatttgagggaaacacatttttaccatgattggattcggtggcttctaggaatcttatgtgaattaagcaatcttctcgccttggcctttcgaagtgttggagctacagggtttttctccagtgtgagtcctttcatggattttaacgctcgaggcacatccaaaggctttaccacattgtttacattcatagggtttctctccagtgtgagtccttccatgtgttcgaaggtgcgaggcagatctgaaggctttcccacattgcttacattcatagggcttctctccagtgtgagttctttcatgatatcgaacggaattgaaagaaacaaaggctttcccacactgtttacattcatacggcttctccccagtgtgagttattttatgtgcatggaggcatgtggaactatggaatgctttcccacactcactgcattcataaggcttctctccagtgtgagttctttcatgtattcgaaggctaccagaatgactaaaggctttaccacactgtttacattcatatggtttctctccagtgtgagttcgtttgtggataagatacaaactgagacacatcaaggctttcccacaaaagttacatttgtagggtccatctccactgtgcattatcctgtgtcttcgaatgcttgaacgggaaataaagctttttccacattcctcacaatcataaggtttccccccagtgtgagcccattcatgtgttcgaaagtaggggagatcactgaaggctttcttacagtatgtacatttatatggcttctgtccatattcctgatactcatatggcttgtgtccagtgtcagctctgtggtgcctattaagggatgcatgacccacgctgacttctccacatgattttactcggggagttttcttcttcagcatgtcatctggaacctgggtcaaaatttctccatgctgatgatctttcttactttctaagagtctctctcccataagacctctgtgaacaatgagaagtatatcataatgggttcctttatcactgatttgatattcattaacaagtcattgcacttgtatttctaacactgtacagcaatgtgtaggctttctgccctgtctgaacatgaacagaccacacatgctctacaagatggcccagctatacctgttatcaagaaagataatattgatatagggcttcttagtactttttaaacattttttgagatagggtctcactctgtcatccaggctggagtgcggtggtgagatctcagctcactgcaacctccatctcccgatctgaagccgtcctgccacttcagcctcctgattacctgaggctacaagcataccatcgtgcctggctaatttttgtatatttgctagagatggggttttgtcacatttccctggctggtctcaaactcctagactcaagcaatctgcccacctcagcctcttaaagcattaggattacaggcatacacctgggcgcccggccaacactattttcaggtaaactattttacaagtactaactgtctttgtcaattttattgcttctgagtcagggtcttgccctttaacccaggctagagtgtaatggtgctatcatggccgagtgtagcctcaaactcttcagctcaagcaatctctgacctgaacctcccaaagggctggattataggcttaagccaggatgttcagcctatgtcacacttaaatatatgtttttagagattttttttttttttgagacggagtctcgctcagtcgcccaggatggagtgcagtggcatgatctcggctcactgcaatctctgcctcccgggttcatgccattctcctgcctcagcctcccaagtagctgggactacaggtgcccgccatcacgcccggctaatttttttggatttttagtagagacagggtttcaccatgttagccaggatggtttcgatctcctgacctcgtgatccgcctgcctcagcctcccaaagtgctgggattacaggcgtgagccaccacagccggccctagagaaaattttgtaagaataaatacagtggaacttggcttatttcttgtttgcttctttttaacattttcttccattctatgattgtctagagagacatcactttctcttgtgaatgcgaattaccttaggtttctcctgggatttttgtactcatcttcaattttctgatctttccatttttttcctaaaatacagaaccagaaaaatagtcctgaattagcaaaattatgaaaaaagtactagattctaagttcatggtacactgcagccttgcagcatttattcacattcctattccctgtcctcactattccctgtccacactccaaatcactcaacactactgacaagctagaaacacttgttctctaattcactgaggaaagtaatattgttacccttacctacagaagccaggttcctgaaggtttcctgcatcacatctctgtagagattcttctgggaaggatccagcaaagcccactcctcctgggtgaagttcacatctacatcctcaaagaccactgaatcctgaaacatcccacatgtgtaaagaaacatgggtgagactgacagcactgggttcctatactctattcctacaaagtttccatggtgctatggactccaaacatttattccatgatctggtcatcagactttttactctgtcaacactcactcttccataaagaaattctttttttttaattattattattttttgagacagaatctcattctgtcacccaagtgggagtgcagtggcatgatcttggctcactgcaacctccgcctcccaggttcaaatgattctcatgcttcagcctcccaagtagctgagattataggcgcctgccaccacgcacaactaatttttgtatttttagtagagatggggttttaccatgttggccagactggtctccaactcctgaccacaagtgatccaccagccttggcctcccaaagtgctgggattacaggcatgagccaccaagcctggctgaggccctaccaatctgactgataagagtcataactaactaaaacaaaaaatcaagagcagaaacctttcttggaaactgtgcttgggtagaaaagcctgaattataactgatgaattgctggaggttgaatggcaacaagattggagaggcaaaaactccagggtgtccagtctcaacaaaaaggcaaatatttatcaaatgtaaaaacttttgtgtgaaatggtgtaagagaacaccatcaagagagaaaatgaaccccatgtgctctgtccaaaggatggtaaatggctcagcccctatggaatagtatgacggtgcctgaaaaaaataatataactaccattttttttttttttttgagatagagtctcactctgtcacacaggctggagtgcagtggcacaatcttggctcactgcaacctcagcctcccaggttcaagcaattttctgcctcagcctcccaagtagctgggattacaggcgcccgccaccatgcctggctaatttttgtattttttttagtagagacagggtttcaccgtcttggccaggctggttttgaactcctgaccttgtgatccacctgtctcggcctcccaaagtgttgggattacaggcatgagccactgcgcctggccaaaattaacatatctttcagcaatctacttttgtgtctacttattttcaattaaaaaaaaattgaaatccagatcttgaagacacatttgaaaaccactgttaacaatagccaactttgggaggccaaggcaggtggatcacgaggtcaggagatcaagaccattctggccaacatagtgaaaccccgtctcttctaaaaatacaaaaattagctggtgtggtggcggtggcgtatgcctgtaatcccagctactcaggaggctgaggcaggagaatcacttgaacaagggagtcggaggttgcagtgagctgagatctcaccactgcactccagcctggcgacagagcaagactcagtctcaaaaaaaaaaaaaaaaaaaaatcagtagccaagagctgcatcaatccacctgtccattcattgattgctgaatgaataacaaaaatgtgataggtatatatatatatatgcaatggaatattatttaatcttttaaaataacaacctgtccgttgttacaacaagcatgaaaatttaggatactatgctaacagccaaggtagtcaccaaaagaaaaatacagtatgattaaagttatgtagagttgtctaactaaatcaactgtacagttaaaattgcataagctggtaaaatttaagttttttactttataattattaaaattaataaaataccaagtaaaaacctaattgattaaaaggtgggcaaagtatttcagtgacgtttctcaaagatacatacaagtgacaagtaagcacgtgaaaaagggttcaacatcaggaatcattcggcagaagtatttttttttttttcagacggagtttcgctcttgttgcccaggctggagtgcaatggcgcgctcttggctcactgcaacctctgcctcccagcttcaagcaattctcctgcctcagcctcccgagtagatgggattacaggcatgcaccaacactgcgggctaattttgtattttcagtagagacagggtttctccatgttggtcaggctagtcttgaactgctgacatcaggtgatttgctcactgtgacctcccaaagtgctgggattacaggtgtgagccaccacgcccggcccgacctaagtattttacacaacaaagtttccggtggttattgagtgctttcctctcatgaaaagtattcataaacaaaatagaaaagtttccaatgcagccattcatggctctgtggaaaaatgaaaaacaaaatactacagctctttcaaatacatcatggtggacacactgatgaagatgtcgattagagaggggagatgggtgctttggaatgtgggaagggaatcagaaatgtaaggatttgttgttgtccccatgaaaaggtagctgtgggggtctcaaggactccctctttgacaaggctttgaccttgtcctacaaaacccagttatagcaaagatccttctaagggagttcagagaaaccccaccctggcccctccaaacgtgatacccaatgaagttctgttacccctattcataactcatcagctttctcttctgtaacccttgatacctcaccaagttccatcctctccctcaatttacccttgaactataggttcaatactgttgttgctgcatgcaaggttgaggtcaatctctctcccatattacagttctcatgacccacatcacaactgtcctgaataaagccttctttgacatttttaacacgatttcagtacaatctttttttacaagggacagggacttagacttgaaaccctgcttcacaagtctggaatgcataggggataatatgctctctccctgtgggaaggaaggagggtgtcctgagagtatctcccactcacatatccagaactctgggtcagacttctctcctcatgaccactccttgttgtcactccataaactgggtgagatgggggactgtggatacaccattacccagacagtgttctacggtggagctcgcctcctgcagtgatgggacacaatgcctgggagtcctgtttgccaattcagcccttaccttgtgtcataaaggagactgaggttccaactgagatggatatatgtgaggaccaggtgtagaattttcaagtttttcttccatttggtgaatactctttgcaatttatttcttctttttttttttaagcctatagcaagcagtattctcatgcattctataaaccatgcagtaaccaggcttgaatctgctcagctgctaagatcagctatactcttgtatttcttttttttttttttttcttttgtctgagacagagtctcactctgtcatccaggctggagtgcagtagtgcaatcacagctcactgcagactcaacctctggggtcaagcaatcctcccaccacagccttctgagtacctgggctcactggagcatgccaccacacctgggtaatttttttttttttttttttttgagacggagtctcgctctgtcgcccaggctggagtgcagtggcacgatctcggctcactgcaagctctgcctcctgggttaacgcctttctcctgcctcagcctcccgagtagctgggactacaggccccgccaccacgcccggctaattttttgtatttttagtagagacggggtttcaccgtgttagccaagatggtctcggtctcctgacctcgtgatccgcccgcctcggccgcccaaagtgctgggattatagatgtgagccaccgcgcctggccagttttttttattttttgtagagacatggtctcactatgcttcccaggttggtcttaaactcctaggctcaagagatccccttacctcagccttccaagttctgggattccagatgtgaaccactaaccttgaccatactcctgtatttcttcattgtgtctttcaaaacagaaaagcttaaattttaatgtagtcaaaattacatactttttctctgttcctagtgtttctcttgtcatattatagcctcttcttcctaaacctaagatcatgaatatttttgggtggcacattctgtagcaacaagagggtgaggttctcctttgttcccagaggagaatgagactggtgtattctgcaggctaataaggaaatgaaactcactatactatggaggataaaagtatataaatttacactataacagtataatgccatataggctaataccgtttatatgtggcacttatatatcatatacacgttacatgtaatatttaccaattacctaccataactaaaccatatactgtatataaatgcaacatatgtacatgtatatgtgtatatatatacacacacactatatcctgtactagataatgctagattctattaaaatactgtacatgaatatctcctttaaatttcaaaagaaaacacctcaccaatatattggaaaagagaatcctataacaatatcatacccgtgatgaagtggcattcaattcaggaaagcaatgctgctctcacctctgaaaatccattcatgcaatacaccataatagtataggatcaacagcaaacaacacaagaacatcataatagatgcagaaaaagcatatgacaaacctcaacatttcttcatgataaaaacactcggccgggtgcagtggctcacacctgtaatcccaccactttgggatgccaaggcgggaggatcacaaggtcaagagctcgagacaagcctggccagcacggtaaaacctcgtctctactaaaaatacaaaaaattagctgggcgtggtagcatgcgcctgtaatcccagctacccaggaggctgaggtaggagaatcgcttgaacccaggaggcagaggttgcagtgggccgagatcatgccattgcacatcccagcctggatgacggagcgagactccatcttaaaaaaaaaaacaacaacaactcaataaactaataatacaaagtaacttccttaacttactataaggtatatataaaaaatgcaaaactaccctcattcgtgatggtgaaggactaactgctttctcccaaagatgagacacagacaaggatgtctgctctcatgccttctactcagcttgagaaaggagatgctactaggccaaccaggtcagaaaacaaaagcctaggcgggacgcggtggctcacgcctgtaatcctagcactttgggaggccgaggtgggtggatcacgaggtcaggagttcaagaccaacctggccaagatgatgaaacccgtctctactaaaaatacaaaaattagccaggtgcggtggcaggagcctgtaatcccagctacttggaaggctgaggcagaaaaatcacttgaacttcgggggagaagttgcagtgagcctagaatgcgccactgcactctagcctgggcgacagagtgagactccatctcaaaaaaaaaaaaaaaaagaaaagccctccagatttatagtaaagacacatgcacggctgggtgcagtagttcatgcctgtaatccggcattttgggaagccaaggcgggtggatcacctgaggtcaggagttcaagactagcctggccaacataacaaaaccctgtctctactaaaaatacaaaaattgccgggtatggtggcgcaggtctgtaattccagctacttgggaggctgaggcaggagaatcgcttgaacctgggagggggaggtcgcagtgagctgagattgtgccagtgcactccagcctgggtgacagagggagtctctgtgtcaaaaaaaaaaaaaaatacatgcagtgattctggcaggcatatagactgtcactgcccataccggtgtacaaactgaggcagaaatacaaaaaggcaaaagacttatgttagttttatatttcttttttttttttttttttttgagacggagtcttgctctgtcccccaggctggagtgcagtggggtgatctcagctcactgcaagctctccctcccgggttcacgccattctcctgcctcagcctcccgagtagctgggactacaggcacctgccgccatgtccggctaattttttgtatttttagtagagacggggttttaccatgttagccaggatggtctcaatctcctgaccttgtgatccacccgcctcagcctcccaaagtgctgggattataggcgtgagccaccccgcccagcccttacctatattcttttgtaaaatattgaaaatgcctgaacagagccaggaagggcctcttttctcttgatcttcattatagattaactttcctcttacctttctcacacaaagacttcatggccatcacagtgtcttaagctggaatgtcaaatttgataatggctcactgcagcatcaaactcctggggtccagtgatcctcctgcctcagtgtcccttgtatcaggaactacaggtgggtgcaaccacacctgtctaatttttctatttttcttttctagacatgggtcttgtattaccaaggctggtctccaactcctggtctcaagcaatcatcctgcctcagcctcacaaagctgggattacaggtgtgggacactgcactaggtcaagagtttaacttttagctccggagttctaagcccatttccctagagtctgtattttcttgaatggcaattctcagattttcacttaaataatctccttataataggaatctgatcatttcaatcatttaaggtagaaaaatccaaacaaggcgactacatcactgtaaccaataaagtattttttgatttttattctaatgcaccatataaaagcctatccttcaacctgtaaactaaaaataaaaacctaagctccccatcccaccccaatcaagtcaactgagtggctctttaccaaggggaggccccccaaaaacctgaaagttcccagttacattagtaagggagatcagacactccatactcccttctggagtttagacacagcaactgacccacattcatattaaaatagacataagacctgcaaagaggccgggcacagtggctcagtcctgtaatcctagcactttgggaggcggagggaggcggaggcaggcggattatttgaggtcaggagtttgagaccagcttggccaacatggtgaaaccccatctctactaaaaatacagaaattagccgggtatggtggcgtgcacctgtaattccagctacttgggaggctgaggcaggagaattgcttgaacctaggaggcggaggttgccgtaagccgagattgcgccactgcactccagcctgggcgagagtgaggctccatctcaaaaaaaaaaaaaaacctgcaaagaaaccctttgtaccaataaatactaaattgcaaacaagacctaaggccatgcaaggcaagggtaaagtcacgccttagaattcataaaatctagtgaaacatatctgttttttggtggggatggaatcacgtggcaggtaacagactcccttcacttaaacattccttcctacccctttcaaattttagacacaacttcacactctcagccaactgccaactacagaatccctcaaccacctgtgccttctaagccccgcttctacgtgtcctgccctgtcagccttccatgccttgattgatcttttccctgcaattcctgtctcgctgaaatgaataaaaccaaactgccatcgaacctcctggggaccacttactcgaggctacatgcggttgtttcccttggtcacgttctctcatattcggcgtagaacatagttcaagttattttgcagagttttgctctttccgttatcaaactgcaagccatgactgggtgtttctcattcaggaaacatttctcattcatttttttcaaactcctattctgagaagcaaaactctttaatttttaagaggactcagtttagtttgttgctgttgtttttgttttgttttgtttgagacagggtctcgctcagtcgcccaggctggagtgcagtggcgcgatctcggctcactgcagtcccaatctcctccctcaagcgatcctcccacctcagccccccagtagctgggattacaggtgggcggcaccacgcccggctcattttttaaaaatttatttttaatagaaactagggtctcggtatgttgcctaggctggtctcgaatttctgggctgaagcaatccccccgcctcaacctgccaggcgtgacccactgcgcctggccttcaatttagtttttcaggaaaaaaggggggactggggaccccgcagcccaccgctcctcccacacgaaccacacacccgaggcaggattgcctccatgaccctcccgtggtctccgcacaatctggggagacgcgggactacgggcgcggagctccccagagagggctccggggccggggccagggccggggtcgcagtcgcagcgcagagacgggacaggacgcctggggtcccggctgccggcccaaccccaccctgcggccgaagggaccgagggccgagctacgccagggggactccgctctgcagacccgaagtcgctgcaggaaggcctgggtcctgctagagccggttcgagccggttcctcccggcccctcccccgtctcgggacccccggccccgcacactcaccatttcccggcttccaggtgtcctggcctcctctccacggatccctctaacagtccagtcacagtgcgggcgatggagcgacagaagctatggcggaggcacctggtccctctcggggccggaaaaccgagatcccgacctccctttggtgcaagacgcctgggagtcaggaaagcgggaatgcggcctccccttccccggatggacagttggcaggaccccgccccagcgcccctgattggatgaggctccagtccccgtcccatcggtcctgagtgacagcggaagccctgggtaacaaggcccggcagaaccgaaatgacctgttccaaccacagattatctaagcgagctccctccctgcgtcttgctctttgggtatttgcatttcagccaaatttgctccgaattgctagagggggtaccgttgtcttcctcactcaatgggctgtccctgctcctttgtcttgcacaggaaattccagactcagagtccagtggaggtgaaggaaattaaaatattttacgccaaaatatatttatttgacagattttgaaatggctgtggctcggccgcaaaaaaaagtggactggcaaagctgtctttggagggggggaatttgcatctgcagagaatctccattgatgaaaccatgccctctccccctttatttctttccctttatccaagctagaagagattgtgacctgaacacaggcagggtgcggtggttcacgcctgtaatcctagcactttgggaggccaagactggaggatcccttaaagtaaagagttaaagaccaacttggtcaacacaagaatacccctgttttgttgttttttttttttaatttttatttattaaactttaagttctagggtacatgcgcacaatgtgcaggtttgttacatatgtatacatgcgccatgttggtgtgctgtacccattaactcgtcatttacattaggtatatctcctaatgttatccctcccacatccccccaccctagacccctgtttttattatttaaaaatctttacggccgggagcggtggctcacgcctataatcccagcactttgggaggccgacgcgggcggatcacgaggtcaggaaatcaagaccatcctggctaacacggagaagccccgtctctactaaaaatacaaaaaattagtcgggtgcggtggcgggcgcctatagtcccagctactcgggaggctgaggcaggagaatggcgtgaacccgggaggcggagcttgcagtgagccgagattgcgccactgcactccagcctgggcgacagggctagactgtctcaaaaaaaaaaaagaaagaaaaagaaaaagaaaatctgtgaaggtcagaattagagcaagacccatttgggatgcctcctggagaaagggtttatgaatttttatttattattttattttattgtatttattatcattttttttgagacggagtctcgctctgtcgtccgggctggagtgcagtggcgcaatctcggctcactgcaagctccgcctcccgcccgggttcatgccattctcctgcctcaacctcccaagtagctgggactacaggcgcctgccaccacgcccggctaattttttgtatttttagtagagacggggtttcaccgtgttagccaggattgtctcgatctcctgacctcgtgatccgtccgcctcggcttcccaaagtgctgggattacaggcgtgagccaccgcgccctgcgggtttatgaatttaacagtaaatttagcttaaactgactcaagtcgagagcttcctgttggtgaaaatgaaggtcttaaaggagagaataatttctaaactgaggaggggacagaagggcatttcaaactcccagataaatccttaattttctctgcctcatcatctgggactgacccgccctggggggctccatttcagcagtcacagtttggcttccaagcttggaaatatcatttaccttctgacagagggttttccttgtgaactgtgcatgaagcaggctgcttatctgaactacttcaaatgtttgctttacttttcttttgattcctttataaaatattgctgccggctgggcgcggtggctcacgcctgtaatcccagcactttgggaggccgaggcgggcggatcacgaagtcaggagttcgagaccagcctgaccaacatggtgaaaccccgtctctactaaaaatacaaaaattagccgggcgtggtggcacacgcctgtaatcccagctactcaggaggccgaggcaggagaatcgcttgaacccgggagatggaggttgcagtgaactgagattgtgccactgaactccagctgggcgacagagcgagactccgtttcaaaaaaaaaaaaacatatatatatatatatatatatatatatatatatatatatacacacacacacttatatatgtgtttgtatatatacacatatatgtgtatatatacaaacacatatataagtatatatatacacatatatgtatatatatgtgtatatatatagctgccatataattccagcttttccatgcacttagttttattctgttgttggcttgttgttttcttgagtgaaaatgagtagactgagagataaagtatgaaaaatctttggctatccctcatcccaaatttataatctctgacgacatcaggcctctctcctcttccagtgttggcctgactagacctcaaggcagacaacctccccacctcaaaccccctccccccacccccacctcccctgaaagaagggcccactgagtacaggaagacaacagtgtcagctctggaaagcctgaaacatattctgaaataccagtatccccagggtgggggccaggctgcagtgcaaggaggaaatccggctgtggctagaatctatatttttcttttcttttcttttcttttttttttttttcgagacagggtgttactctgtcacctaggctggagtgcagtgcgctgatcatagctaactgcagcctctaccttcaaggttcaagcaatcctctttactcagcctgctaagtagctgggactatagttgcagggccaccaggctgggctaattttttttttttttcttttttttttagagatgaggtctcactacgttgctcaagctggtcttgaactcctggcctcaagcagttctcctttccagccctccccgagtcctgggattgtataggtgtgagccacatgtcgggcctagaacctttcattcaagctccactcagccaggtgttaaattctcctctcactccgcctcccagaaggcggggcccgtggcactgtccaatcaggaggggcgggggggtgtggctgtgcaaattgtccaatcaggcgcggctctgggaggaggccgcgaagctccataaaactgcgaggcgttcctttcacccgcccacagtgggtgtcaggtctatgctgctctgagaagcaccagaggtggcttcgctgcagcttctttccagctgtgacttgcaatgaacacgaaagacataaggagaaccatagacacctcagaagccaggaaatggtgagtgctggggggatgtcccgagactgtggagcaaggtgctggacaggaacctgctgtgacgggacccaggcctgtccggggcgacttcgggaccggtggactggagtccccctagcgcagccaccgcgcccgatttaagagagaattttcaatggctaaactgcacatgtacatctcctgacacagagcacctggtgacaaccatcaactgtgaaggtcagggagctgctgaagcagaagagagtccatatttcattagtttttttttttttttttggagacggagtctcgctctgtcgcccaggctggagtgcagtggcgcgatctcaactcactgcaacctctgcctctggggttcaagcaattctcctgtctcagcctcccgagtagctgggactacaggcgcacactgccacgcccagctaattttttgtattttagtagagacagagtttcaccgtgttgctcttgttgcccaggctggagtgcaatggtgtgatctcagctcacggcaacttccgcctcccaggttcaagcgattctcctgcctcagcctcctgagtagctgggattacaggcacgcgccaccacgcctggctaattttgtacttttagagacgaggtttctccatgttggtcaggctggtctcgaactcctaaccttaggtgatccgcccgcctcgccctcccaaagtgctgagattacaggcgtgagccaccgcgcccgaccttcattagtggttttatataacagtttgttaatgtcgaaataatagtttgctggcttcttcattttatcaaaggaataattatttgccagttttaaaatccacttaaaactgtcttgaaatttttctcttctactttacggtaaacacaggaggaaagcagggactctgctggattctctttcgaacactgggattgagggtgtttgcctcgtggaactgaacaatgtgggtgaaaagcaggtggaaaacttgcagggggcagcatagcctgaggccggtgatccacactgagactaatctggagcctgcaaagggagggaaagggagctcccccgattgcttcctgggcagcctgccttcccctgtaggtagtctccagctgctccgaacagctccagctccagctccaggagtgtggattctgagaagctgcagagccctggaaagcaggaacttcacaggcaaatgcacgtgcgggtttctctcctttctgaggttgtacctctagtttcccaaggtagttttccggaaaactttttgttttttgagacggagtcttgctctgtcacccaggctggagtgcagtggcgcgatctcggctcactggaacctctacctcccgggttcaagcgattcttgtgcctcagcctccccagaagctgggattataggcgcccggctaatttttgtaattttagtagagacggggtttcgccatcttggccaggctggttttgaactcctgacctcaagtgatccgcccgcctcggcctctcaaagtgttggggattacaggcatgaaccactgtgcccggccttgatttttctatgtatagagttgctgcagtcaggctgtaatttgtatatatgaagaaaatatgtaaagatcatatttagagactcatttaggtagcgttccagagaaatggtttatgagctagagaggttggaatttcaaggggcctaaattgaccacaggtgagagttttctgctggtgtaaattattaaggtattgaaggagggagcgttcccacattgtgatgctgtgacaggagggcatgttgagctcccagagttaaatccttaggtttcctgcctcatcatcagggtctaatgtactctgtggctccacttcagcagtcactgactcttaagcttgggaatatgttctaccttctgaattcatcttttcctttttaaatgttctgaagtgccctgcttatctgagctagttcaaattttcgctttacttcccttttgatttctttacagattacggaaatagaacttgtttttccatgtatttaataattttattcacttgttggcagttttttattttcttgggtgaaaatgagtagattgatttgggaggcgaaagtgggaggttcacttgaggctaggagttcaagaccagcctggacaacaaacgaaatcccgtctctacaaaaaattaaagaatttgccgggcttggtggcatgtacctgtagtctctactactcaggggactgaagcggaaggttcgcttgaacccaggagatggaggctgcagtgagctatgatcatgccattgcactctaacctgggtggcagagctagaccctgtctcaaataaataaataaagtaataaataagtaaataaagtaataaataagtaaataaagtaaaaaatagagagagataaagaggtatggtatgagaaagccttgggcacgcttcccatatcctcatcccaaatttccgatccctgggaatatcacgccctttcttctgttccagtcctgcctggaactccctgcgcacacctgtgactcctcatgcaagaggtagatgaagaaatgacccactgagtacaggaagtatctcctttggtaaacccggattaagttctgctaaaatgcaagtatctcccatctccccatcccccgcagaccaagtacagtgaaggggacgaggggaagaagtccaccctgcgtttgagggctggggccaagacccctcattcccgcttcactcatctatgcttcacatctcctgtcattcacatctgtcaagatgcagggggcagagcccgaagctgtacccaatcaggggcaccggggaggagctctgcgatcggtccaatcaggcgcgccgtcggggacgcagctgcagacgttcaaccttctcgcgggattttcatttctcgcgtctgccgtacttggtttcgcttcgctagtcccagaggcccagagtggctcgcctggagtctctgtggcgcggtttcctgtacctgccttgggatccggagggaggaagctgggacacccgggagtcaggaaatggtgagtgtgtcgggccctgcgtcccgagacagggaggaggggctggttggacgaccggaactggctgtggcgcggcccgggccttcccgtgggcgactctgggtctgcgtaccgagtccctctggcgcagctcagcccttggtaccctcggcctcagggtggggctgggccggcagccgggaccccgggcgtcctcgtcccgccctgtgccgcgattgcggccccggccccgaagacccaagtctcttcagattgtgcggggcccacgcgagggtcatggggtgggggaaatcctgacttgtgcgtggaaggagctgtggtgtatgaggttcccagttccttttctctccacagaggacacccgtttttccctgagttttctaagtgtatgggatgcagggtcccaaatcctcactctgtcccccagcctgctgtttccagggcttgcagtaaatccccaaatttcctgttctcttttcgcttttccaaacgccaacctctccccttccattcacgacattagcaaccgtttctcctatattctacatttcagatattgtgctttcattgtttatttttcaacaaagcaatggattactctttcatcaaggtttgttttctgttcatagccttgacactccgctgtaagaaacctttgtgcttgtccttttgtctcctctatgcacagatacctcatcagaatgtctttgagttgaggttcccctttggaatctttacagggtgatatgccttcagcgccccctcctatttattttttcctggttctgggtttcaaaactgtctggggctgactcaagctgcccacagctgccaagtctcttggaggatctagtgaatattgggtcttgggtgagtcttcctagaggacagttgaaatagaaggctgggagaatgccctgggactaggataaatctagcataccctgcttctaaatagccaacctctgggggcactcagcttttcctcccccaaccccagtttccatcctttggagacacactggtggtcagccaatcagatgctggtattgaggattgagaaaagaaaattttttgtgtgttttgaaagagtctcgctctgtcgcctaggctggagtgcagtgacgtgatctcggctcactgcaacctccatcttctgggttcaagcgattctcctgcctcagcctcccctgtagttgggaccacagttttgcgccaccactcccagataactttttttttttttttttttttttgagacggagtctctctgtcgcccaagctggagtgcagtggcgtgatgtcggctcactgcaacctctgcctcccggattcaagcgattctcctgcctcagcctccccagtacctgggactacaggcgcatgccaccacgcccggctaattttttgtgtttttagtagagacggagtttcaccttgttagccaggatggtcttgatctcctgacctcgcgatccgcctgccttggcctcccagagtgctgggattacaggcgtaactgtacccggcctcaaaaaaataattttcgtctgataaatgtgggtccttttaaatgaacgggcacatagagacattcaagtgatacagcaatcaccttctaactccctgaagctatgaattcatcttttgaaactgctattgccacaagtaggtataatcaacttactaatgcaacacgggaccctggaacccacaccctatagcttaacagtgcatagccacgcgcttatcaatgttacttctgtaaatcagtgagaattcctgacaaacaactttgtatcagcccacatcctgtccccctttttcagacactttgggtcatattttgtgtttcagcctctactttttaggtcgacaagggaaaagacggaaatgattcctgtcctttgtattctctcagccttgtgaagggagaaaaactatctcagcgaggtggtggaataacctgaaaaacaaaatgcactttgggtacacagtgtcgcgtaatgcagtgtctcttgggcgggtggtcactgagcatttcagtgagcactatgggggtagagggatgttccaactgatagataagatgacctctgctgacactggagtcagacgaatgtctgtattccaggtcagcactgcttctccctgggattcttgccttaacaacaagttcagcttgagtatttcatttagttgaaagtgcattttatcagtagagcttcatagagaagataatgtatttcccaagaggtagatttcagggggaaagagattagtcttatattccacattttaaaaattcttattttcaacggcttgtatctgtatttctccatattttggagtaattatctgcatgatatgtgtaggtgctgtggctttttacctaagaagcagaatctcattccagtacatttgagagtcatgatgccaaatctttgatggtctgtgtcagagacacaaagtctacaatgtgtgtgttcacagtggtgtggattttatgcctcaagtcacttagaaaagtgtcttagaaaacctggacagtgcccttgtgtcttcacaataattcttttgtgtatttatggagatgattctgtaatcttttgggacatggaccaatgtgtatctcttcatactcatattctgcaccatctgtatgtagcacgtcagacttagcggtgtgaccttaaactttttaaaagaaactggaaggtcaataaaatttaaactgctggctgggtgcggtggctcacgcctgtaatcccagcactttgggaggctgaagcaggtggatcacctgaggtcaggagtctgagaccagcctggccaacctggtgaaaactcgtctctgctaaaaatacaaaaattagccaggtgtggtggtgggcgcctataatcccaggtactcaggaggctgaggcaggagaatcacttgaacccaggaagtggaagttgcagtgagttgagatcatgctattgtgctccagcctgggtgacagagcaagactccgtctcaaaaaaaaaaagaaaaaaaatttaaactgcttaacaacaaattcttattttcttttattctttcccagatcatgtgtagtatatgtgtagtatgtttgtcagatctgtgttctgttgggtgacttgaaatggaattccagggcttaaccttgagaatattatcagggaaaagaaatgggggtggggagaaccaactctcctattatggcttcagaaaaatgaatatagtttcccaagaaagttagtagataaattggggaattacaaagattcaccaaaacatcaatttctcttgcaaggtggagaatttgtgacggtgaataactgttctgtttcctgttattggaacttagcagattctaaatcttagggaacaggacctggcaacaactaggaatcctctaataggatttttgtttactaaatgatttgttatcatagaaatagtagttaagtgacatctttgtctgaaaatagtagattcttgtgctttttctgttcagctatgatgtaaatgtgccttaattttcttccctcccataaacattaagattgattttgctggattcatcaaacatgagtcattaaacatgggtattttctttaaatatccacatgaggtatgtaaagggaagtgggtagccttgactggggtgcagaggcctgaggccagcgactccaaactgaggccaatccaaaggagtactgcataaaggaaggcaccaatcaaatataagatctgcaaagatctgaaagtttaggcagaaaagtgttttctttcataggaaggggcaaacagattagaaagaagatgaggaggaagaaggcaggatggagggtgcaaaatcagacctagatcagaacatgttttattctgaggttattctgttcttaggaagtgttgcctatttgttcaggctgagagtgggtcaaagttaagggcctggaggaaatttacaagtcaagggcttgcatctgtagttctctatattttggagtaattatctacatgatatgtgtaggttctgtggcttttcacctaagaagcagaatctcattctagtacattgaagagtcatgaagccaaatctttgatggtctgtgtcagagacacaaatttaaggaatgtttggttaacaaatgttttgttcccactgatcagtgaagacaaaactgttcagctaatgttttatgaagcaaagaatgggcatttgtagacctgatgccatggctcacgcttgtaagcccatcactttgggaggctgaggccagaggatagcttgagctcagcagtttgagaccagcctaggcaacattgccagactttgtctcaaaaaaaagaaaagataagaccgggtgcggtggctcacgcctgaaatcccagcactttgggaggccaagacaggcggatcacctgaggtcaggagttcaagaccagcctgaccaacatggagaaaccccatctctactaaaaaaaatacaggtgcctgccaccacaccccgtctctacctaaaacctttgtacaaaaggcaaaagcatctaagtctgcccctcagagactttcccaatttgtacagtttattctacaattaaactaattctgtgaaagcaaagccaaactgctaataatgttgagttttactcaagccctataatccagttaaatagatatggtcatagaaatcactgccttgttaaccactcagttctttctgttttgcagacgcagactcatgcaaagataccttttccattacttcacggcctttttttaaaaaataaagccagatactgactacaaatgcccatttttttttcttttctttttcttttttttttttttttttttttttttttttgtgagacggagcttcgctctcattgcccaagctggagtgcagtggcgcgatcccggctcactctgatctctgcctcctgggttcaagcgattctcctgcctcagcctcccaagtagctgggattataggcgcacaccaccacgcctggctaattttttatatttttagtagaaacggggtttcaccatattagccaggctggtctccaattcctgacctcaggtgatctgcctacctcagcctcccaaagtgctgggattacaggcatgagccaccacgcccccgacaagccccgtttttgatcacagtaaagggggagaggctggatattgagttctgttaatgtaaaaattctggaatgaagacattcggagagcttcctggttggtgaacgcagtgatgttctaggagggtggtactcaagtcctgtagggaagggggtcctatactcccttccctggagggtctagtgaatattggcccttgtgtgactcctcccagaggacagttgaagtagagggctggggccttccaggggacccccacttccctggtcatatatatcttttccatttggctgttcttgggtcatcctttttttttttgagatggagtttcactcttgttgcccaggctggaatgcaatggcaggatctcggcttcctgcaacctccacctcccgggttcaagcgattctcctgcctcagccgcccaagtagctagaatcacaagtgcctgccaccaggcccggctaatttttttgtatttatagtagagatggggttttaccatgttggccacgctggtctcgaactcctgacctcaggtgatccacctgccttggcctcccaaagtgctgggattataggggtcattctttaaaacaaactggcaaacttgtgtttttctgagttctgttagtagtactagcaaattattgaaattgaggagcgtttgttggatttctatgcagttggttagaattaagggtgcctccactcctccctgctgtaccaccctcccagcacatcagggccgggactggcatctgcagtgggggctgtgtcctggggtgggccctggacttgtggggtctgggctaatgccaggtgatgtcagaattgaattactggatccccagctggtgttggaaagttagttgatactgagcagtctccacatatttgttgtcagaaaaaatgacatcacaggtcagaaccttacatcgacttggtgagtggttgctggtgagaattaagaccctggaggagggagcatttccacactgagaaggggacagtagggtgagtagtgctctgcggattatattttctaattactcaaatattcctcactcattgcctaggagaagccactctgagctacatctccacagtgagagtgtagtaaacttttgaatgtgggtaaaggtaaacaaataagccttgggcatttctggcatgtctccctaatttcatcctccttctctgtacccagaggtgaccacagtactgattctgaatttttttttttttttttgagacggactctcgctctgttgcccaggctagagtgcaatggagcgatcttggctcactgcaagcccagcctcccgggttcatgcgattctcctgcctcagcctaccgagtagctgggacttacaggcgcccgccaccacacccggctaatttttttgtatttttatttttatttttattttttttgagacagagtctctctctgtcccccaggctggagtgcagtggcgtaatctcggctcactgcaagctctgcctcccgggttgacgccattctcctgcctcagcctcccaagtagctgggactacaggcgcctgccaccacgtccggctaattttttgtatttttagtagagacggggtttcactgtgttagccagggtggtctcgatctcctgacctcgtgatctgcccaccttggcctcccaaagtgctgggattacaggcgtgagccaccacgcccggccatttttttgtatttttagtagagacggggtttcgctgtgttagccagggtggtctcaatctcctgaccttgtgattcacccaccttggcctcccaaagtgctgggattacaggcgtgagccaccgcgcccggccttttgtggtttctttgcctcagtccgttgcacacatgctgctgtctgaggctgtgggtcacccaggttactaaccattccactgcttgatttgagttgttagtattttatctgttgccaatgtaattgttgtttttgtctccaagtgctaatgcttcataaacttctttttttttttttgaggcaggtcttcttctgttgcccagactgaagtgcagtggtgcaatcacagctcactgcaaccttggcctcccaggctcaagcaatccttccatctcaccctcccaagtagctgggactacaggcgtgtgccacatgcctgattaatggttgtatttttttatagagatggggtcttgccatgttgcccagcactcaaacccttgggctcagcactgggattataggcatgagccactgtgcccagccatgcttcataaatttttttttttttttcgagacggagtctcgctctgtcgccaggccaggctggagtgcagtggcgcgatctcagctcactgcaacctctgcctcctgggttcaagtgattctcttgcctcagcctcccaagtagctgggattacagtcacatgccaccacacccagctaattttttttttttttttgagacggagtttcactcttgttgcccagtctggagtgcaatggcaaaatctcagctcactgcaacctctgcttcccaggttcaagtgattctcctgcctcagcctccagagtagctgggattataggcatgcaccaccacgcccggctaattttgtttttttaatagagacagggtttctccatgttggtcaggctggtcttgaactcctgacctcaggtgatctgcttaccttggcctcccaaagtgctgggattacaggcatgagccactgcgccaggccccacccagctaattttttttatttttagtagagatggggtttcaccatgttggccaggatggtcttgatctcttgacctcgtgatctgcctgcctcggcctcccaaagtgctgggattacaggtgtgtgccaccgcacctggctgctttgtaagttttttatacattggaaaaaaaaatccctgggatgtagcttatagatagattgacttgggaatgccaatggaatatatggattaaccatctgaccatgtatgcatgtgtatttactccttataagtagttctctttatttttctctgtgtgattacatgttgctttttacactaggattgagcattttttctgtgtggcctttcatcttctgtaaaatagttttcagtcatcttgtcacattaaagtcatttgtatatttattgcttcatttcttcccttttttctttttttaacttactctgtaggctaattctttttcatttatagggattgctaatattttgttccagggagtgatttatcttttcactccattctacattttgatggactcttaaatttttttgtttgttggcttttttggccgccttctgcatgcaccatcatcaagggtggggaagggtactcttcttgattttaattgagttgactttggctcttcctttcaggcctacttaattttcttgtaagagaacattctagagagtgtatatttagggcaacttgaatctgtgctcccaggttaaataaagaacactctccctactgtcaagttggaaaaaaaattgtaacttatgaaagtttgctactttttaaaattttaaaattttttattttctctctctctctttttttttttttttttggagacagagtctcgctctgccacccaggctggagtgcagtggcatgatgttggctcattgcagccttcgcctcctggcgtcaggtgtttccagtgcttcagccttccgagtagctgggatcgcaggtgtgagccaccatgcccggctaatttttgtagttttagtagagacagggttcctgacctcaagtgatctacttgccttggcctcccaacatgctgggattacagacgtgagccactgtgcctggctgcttttgtttttaagaggtttgtgtttttctgatttgatcttgtttatagctggagactggctaaaactttatccctgtcctggtgtggctctgggggatttcttggaggatatttaaaatgtgcctttcaagggatatttcttcattctgttggagggcctgatgcctagatgttatacccatgaccaggtgtccctctcacagcacacttgtttatacttgctctgtacaagcaggcaccttgtagatcttgtctgaccattgtcagtttaatcctagactagagtagccactaatccggtatctattagtggctaataaacactaccactctgttcctaccaagagagccccgattatgatagtagttaggttcaaatagtagtcaggtgtgtcagttaggcaattaggtgagactcggaggagacaattcaacaaacacaggaaataacagaaggagtttattacttataaatcccagaggccggctgtggtggctcacgcctgtaatcccagtactgtgggaggctgaggcaggcggatcacgaggtcaggagatcgagaccatcctggccaacatggcgaaaccctgtctctactaaaaatacaaaaatgagctgggtgtgatggtgcgtgcctgtaatccctgctactcgggaggctgaggccagagaatcactttaaccagggagtcggaggttgcagtgagccgagattgcgtcactgcactccagcctggcgacagagccagactccatctcaaaaaaaaacaaaaaaattcccggagagaggagagtagcatgtcttgtaggccagcaggtaggtggaactatttgtgacacataccctcagcctgtcagtggggagcaagggaaagagagggaattgtgggccaaatcctttattggggtccaaggtgttacctaacccaatttctcttcaggaggttttagttggtgtgtttagaagaaggaagcacagaggctaagaagagtcagcagacaggccttattggttttcccactcaatctattagtattagtccatactctttttgtccaattgcagttctacggggtgttccatacttttatcattcctattgaatgacgtctgtataaaacgccatgcttttatcattcctattgaatgatgtctgtataaaaggcccaagaggatagggtatggggagcttctggacagctgaactcagggagtcttgtattataataggaaggtgatcaagaactcatcctcatgccaggagcgagtcatactgtaactctaccggaatggaagctcctgtgcttgggacccttgtagactttgccctatgcttctccacctggctgtttatttgtagcctttaaaatagcctttataataaacttgtaaacgtgttttcccgaattttgtgagctgtgttggcgagttaattgagccaaaaaagggtgttatgggaccctcaatttgaagcctgttggtcagaagttccagaggcctggtcttgccactgctgtcggatgtgtggggtcagtctcgtaggactgagccctcaacttgtggcatctgctgctgtccccaggtagatagcttcataatcgaatcggtttggcaggcacccagcagctatatgctgcacaattgattacttgccttttttttttctttttgagacagagtttcactgttgttgcccaggctggagtgcaatggcatgatctcggctcactgcaacctctgcctctcgggttcaggtgattctcctgcctcagcctccccagtagctgggattacaggcatgcactaccacacctggctacttttttatttttagtagagatggggtttctccatgttggtcaggctggtctcaatctcctggcctcaggtgatctgcccgcctcggcctcccaaagtgctgagattacaggcgtgagccaccacatttggccaattacttgctttttgatgtggagaaatccccacacagttggtcacagaagccttttgtgttgatagttgtggtgtgaggggaatagcaaggtgtgtttttttcacttagatgatatgcagagggttgaatattctcttgtagataaccatttgtccctgtccctgtgtcgaagtatctgtaatctctatccctgcctgacagtgcctgctctgtcacaggttcttgggccttaaatagatgctcttgtttcagattttgctatttttcattggtctgtctgtctctctggtaataccatactctcctgattactacagatttcaaatcctcgatgtatgttagagaaagaacctccctatcttagtcatttttgcctgctgtaataaataaccacagactggatgcctgaaacaacaagcattaatttctttctttctttttttttttgagacggagtctcgctctgttgcccaggctggagtgcagtggcaccatctcggctcactgcaagctctgcctcccaggtccacgccattctcctgcctgagcctcccgagtagctgggaccacaggcgcccaccaacacacccagctaattttttgtatttttactagagacagggtttcaccatgttagtcaggatggctttcttttttttttttttttttgagacggaatcttgctctgttgcccaggctggagtacaatggtgtgatctcagctcactgcaccctctgcctcccggttcaagctgttctcctgcctcagcctcccgagtagctgggactacaggcgtgtgccaccacgcccagctaattttttgtatttttaatagagacagtgtttcgccatattgactagctccaagacagaaaggcagagtagattagagtgtatttttggtttctatggtctgccttgcagagaaaaaagagcaagtgaaaggaggtcagttgaagggcagagagaaagattctgttttctttcgattttttttttttgggggggacagagtcttgctttgtcacccaggctggagtgcagtgatgctatcttggctcaccgcaacctccacctcctgggctgaaacgattctcctgcctcagcttcctgagtagctgggattacaggcctgcatcatcacacctggctaatttttgtatttttagtagagacagggttttgccatgttggccaggctcgtctcaaactcctgacctcaggtgatctgcctgcctcagcctcccaaagtgctgggattacaggtgtgagccaccacacccggccttatactttactttttagagtagttttaggttcacagcaaaattgcacacatagtacagagttcccttatgccccctattcccactcagtcacaacccgtccagctatcaacattctgcaccaaagttgtacatttgttacaattgaacctattttgagacattattgtcatccaaagtctagcctacattagaatttattcttgcagttgtacattctgtgagttttgacaactatacagtgacatttctgttatggtgtaatacagagtagtttgattgtcctaaaaaccctctcatccacctatttatccctctccccctgacttctggcagccactgatttttgtactgttctatgattatgtcttttctgcagtgttacatagtttgaatcatacagtatgtagtcttttcaaagttgtttcttccacttagtaataagcatttgcgggcatgtgatcatgaaattttttttaaaaagtaatacgcatttaaggttcttccactaccttttagctcatttatttttagtacctccattgtctggaggtagctgttatgtatccatttgtctactgtaaggcatctcagttgcttccaaattttgaaaattatgaataacgctgctataaacatctgtgtacaattgtttgcctggacctaaattttcagctcatttggataaacctacctttggtctggaggttaagagacacccctgtgccacatgggatgggttgtaaagaattcactctgaaaatcaagtgaatgtgggcctatgatgaggtttgtgtaaaacccctgtgtgtgtatgatctcctgattcaatgagtacttttttttttttgagatggagtttcgctcttgttgcccaggtgggactgcagtggcgggatctcggctcactgcaacctctgcctccttgattcaagcgattctcctgcttcagcctcccgtatagctgggattacaggcgcttgccaccacacccagctaatttttgtatttttagtagagatgggttttcaccatgttggccaggctggtctcaaactcctgacctcaggtgatccatctgcttcagcctcccaaagtgctgggattacagacgtgagccactgcgcccagcctttccatgagtattaatctccttttttgtaacagatctcctagtgggtgctgcgttaaacagagctgaacaaataaccctatctgcctgaagcagggtgggagacaagaaacaagatataagtagaatatgcagtgtgtcagatggtgcttagtcctaaggagagagagaaagctggggaggagtggagaggcctgggctgtgtttgtctctgcaagcacctgtttatgtctctgaggtgttatctctgagggtttgtgtgtctacctgggtatggccacctatatgtgcagtgacaaagtgtgagtgattttgtatgtctgatggggagacagaggctgtgtttgtatgccctttaaaatctggaatgcttttatttcattttcttgcctgattgccctggtagcatcttttagcatgttaaatagctgtgtcaaaaacagacatccttgtcttgtatttgatcttagggggaaacattcagtgtcaccatcagtatgatgttatagtggggttttcatggataccttatttcaggttaaggaagttcccttccatttccagtttactgaatgtcttcatggtggaagaggtattgaaaggatattgacccttgtcaaatgtttttgatactgattctattaatattgtgattttcaaatgtgaaaacagtgttgcttttctgggctacgtcccacttaagtatagaagtttttgtttgtttgtttttgttttgagacggagtctcgctctgtagcccaggctgaagtgcagtggcgcgatctcggctcactacaacctctacctcccgggtcccagttcaagcaattctcctgcctcagcctcctgagtagctgggattacaggcacatgccaccatgcccagctaatttttgtgtttttagtggagatggggtttcactatgttggctaggctgctcgtgaactcctgacctcgtgatccacctgtcttggcctcccaaaatgctgggattacaggcatgaaccaccgcacccagacttttgaaaaatctttttggtaacagtcattctcgcaggtgtgatgtctcattgaggttttagtttgcatttccctaatgatttgagatgttaaacattttttcatgaatgtctttgtcatttatatttgctcttttcagaaatgtctgtttagatcctttgcccatttgaaaaattggaggccaggcccagtggctcatgcctataatctcagcactttgggagtctgaggcaggtggattgccagatctcgggagtctgagaccagcctaggcaacatggcaaaacctcatctctaccaaatatacaaaaaattagctgagcattgtggcatgtacctgtggtcccagctactcccagctgaggtgggaggatggcttgagcctgggaggcagaggttgcagtgagccaagattgtgccactgcactccaatgtgggtgtcagagtgagactcaatctcaaaaataaataaataataaaagttttaaattggattgttttcttgctattgagctgtttgaattctttatatattttggattttaacaccttatcagatatatggtttgcaagtattttctcccactccgtgtgttgcctgcctttccactctgttaattgtttcctttgctgtgctaaaaagctttttagtttgacatccacatccacaatggtgctgtcaaaaacagctacatgggaacttgtttatgtactctttctgcagtgtctggtttcacccagaactcttttgtgagattaagcaccttcctcatatcaggaagattgtgggtctttcctattattcacagctgaatccctgagttaggtttgattgtatgtgatcaaacatagtatgtattatttcctcaagcaacatttttggacatgtttcttagaaatagtttactaactggtttcgaacagcatgtatgctaacaaatgttaatgtctttttcatttgctgctaagttatataaaaaattccattgcaatcatggatcagatcaactttataataaactttataattttgtggcgttatttgttaaatattgtgaatcaggcggggaggggtggctcacgcctgtaatcccagtactttgggaggctgaggtgggtggatcatgaggtcaggagatcgagaccatcctggctaacacggtgtaaccctgtctctactaaaaatgcaaaaattagccgggcgtggtggcgggcacccatagtccctgctactcgggaggctgaggcaggagaatggcatgaacctgggaggcggagcttgcagtgagccgagatcatgccactgcactccagcctgggcagcagaatgagactctgtctcacaaaagaaaaaaaagaaagaaagaaaaaaaaaaaagaaaaattgtgaatcaatattctgtgcatacaattttaggtgtgtttttttcacataaattttcattttcatgctcatgtagtcacagtttttatcacaagaattatttctcattcacttatgataccaaaagttaaatcaagcttttaacctttttccaaagattatcaggaccatagctcctgtcaaagaaggtataaaaaaaagtcatcataaatatgatagtaaaccatacgtgactgtgtggtgtatcaataggagagcgctcaaaagaatttctttttttttttttcttttttttttgagatggagtctcactctgtcggccaggctggagtgcaagtggcacagtctgggcttactgcaacctctgccttccaggttcaagctattctcctgcctcaccctcctgagtagctgggattacaggcacaggtcaccatgcctggttaatttttgtattttttatagagacggggttcctccatgttggccagggtggtctcgatctcctgacctcaggtggtctgccagcctcggcctcccaaagtgctgggattacaggcgtgagccaccacacccagcccaaaagaatttcttctaggacgtgtgcttgcttcaggtgtattgattgctattcaaagcaagaagcttctctggattgtatactatgaagaagcaaggttatttctggccttggttattatgatagttcttacccagaagtaaaaaagatggagtggcgctaagtttattacctaaacactgaaatatttcttatgatgaattagacatggcttcccataagatacctcagttgaaatatataaattctaactattgataattttttttttttgagacagagtctggctctgttgcccgggctggagtgcagtggcgcagtctcggctcactgcaagctccacctcccgggttcacaccattctcctgcctcagcctcccgagtagctgggactacaggtgcccgccaccacacccggctaatttttttgtaattttagtagagacggggtttcaccatgttagccaggatggtcttgatctcctgacctcgtgatctgcctgcctcggtctcccaaagtgctgggattacaggcgtgagccaccgcccccggccaactactgataatttttaaaagtctcccttattagtcaaattaggctaatgcctctaggaaagttgtcagaatataaacctagcaagggacagagacatgatcactattctaatcaagcctctcttgctcagataatatgctcttgatgctaatttttcaatatgcctcatatgccagaactgtagactcagaacatccagaattaagcacaaatgatgcaggcactgaaggctctgatatgggaacacaaagtgaataaattcttgaaatcctggtgcttatatttttgtgagaaaggagaggggttgaaaaaatggtaagactggtttataagaaggaaataagcactttgaaggaaagtaaatgatggtgtgagataatacggaagctgagggtgtgtgtatatgttctctgtggagggtggcaacatcagtgagtgaagaaatgtcaccatcggtcatttatatttccacctcttatacatcttcagcaccatttcaggaactgcttaagtgtggatgtagatagtgcatagcaatatagacagtcctgcctttttgaggttaacaataatgattccccgtaaagatataggtatggcttattgtcatttttgcattggttaaaaattttaatgcatgtaatatgtgatgctgactttggacatgggtatctggaacctggaggaaggcacaccactgcatacggtgtgtgctagaaccacgttggatccctgttgaaacatcttaagtgttctgccccttaagccacaggggcggagcctgaagttatatccagttaggggtgccaggatggcatcctacttattgtccaatcaggcgcgcctcagagccctgtctgcccccaacctcaccccaccctgtacgatcttgtggtgaattttcttttcttgagctggctgcattacctttcttctggctcctggctccactgccctggctctgtgctctgtgctggccgtggtagccggagggaggacccaggagaccccgaagatgggaaatggcgagtgtgggaaatggcaagtgtgcaggggcctggggtccgacatggctggaggggcccaggcctcctcgccatcagcatccgattctgtttcatctgagttgctcaaatgtgtgggaagcagggtatcaaatccacccccggcctaactctccttgatctggcagcaaactgctaaattgtaggtataatttctgcagtccccaacaccagcttctgttctcggatgcacagtgttatcaactatttggtttttttgttttgttttgtttttgcatttgtttttgtttttttttttttggtggagtctcattctgtcgccgaggctggaatgcagtggcgcaatctccactcactgcaatgtccgcctcctggattcaagcgattttcctgcctcagcctcctgagtaggtgggattacaggcacctgccaccacgcccagctaattttttttggggggggacagagcctcactgagtcgcccaggctggagggcagtggtgtgatcttggctcactgcaagctccgcctcccgggttcacaccattctcctgcttcagcctcccgagtagctgggactacaggcacccaccactacgcccggctaatttctttgtatttttagtagagacagggtttcaccatattagccaggatggtttcgatctcctgacctcgcaatccgcctgtctctgcctcccaaagtactgggattacaggtgtgagccaccgcgcccggccatttttttgtgttttttagtagagatggggtctcaccgtgttggccaggctggtctcgaactcctgacctcaagtgatctacccaccttggcctcccaaagtgctggaattacaggtgtgagtcaccatgcccagctgactatttgtccttccttctccattagagaaagatgtcatattttaagtttatcatttttgcagaaggcagtggatgacagttttataaagatttcttttatgtttgtgaccttttcgcctgagaggtaagcagagaataaccacctgaaactccattgtgaaaaagctttgtgtctctcttttatcttctctaagtgcaaacccttatcagaatgcctttgcattgaggttcccctttggaaactttgcagggttgattgccctcagcctgtcctctcttttcctggtcctggggttcagaactgactggggctgccccaagaagcccatagcttccatgtctcttggagggtctagtgagtatcagctcatgtggcccctcaggggagcccctggatgccttggacctagaagcagtgacatggtttactcttcctctgaaaagctcacctcttgggacactcagcttgtttttctctagccccagttttcattctttggagacatgttagtggtcagctaattggatggcagtattgaggggaaagacagaaaatgattcttgccctctggattctctcagagtacttgaagggagaaaaatgatcccaaaagacaaggaaaacccacctctgccaggttatgcaagaacttgaaaagcaaaatgcacttaggcatgggggtgggggcacagtccactgtctctgggaagggtcggtgagcagcactttagtgacaggatgggggttggggggatgtcccatgtgataggatgacctgactgggcagttaagtcagatttctctgtgttccaggttagagtggccttccctgattttgtcaccttaagaagatttgtttacttacttcatcatgtaaaatgtattttaccattaaagcttgaaagataggctaaaatatttccaaagagatgagaggtgtatctcagaaaaataaatatctacccttatatttgttaaaaatttgtatttaatttttccccccagaacatatatgcagtaagtttctcaggtctgttcttttttgtgattttgttgttgttgttgttgttttgtttttttttggtttgtttgtttgagacacagtctggctccaggctggagttcagtggcacaatcacgtctcactgcaacctccacctccccggttcaagcaatcctcccacctcagcctcctgagcagctagaaccataggtgcaggctacacgactggctaattttttgtagagatagggtttcaccatgttgcccaggctggtctcaatctcctgagctcaagtgatcctcctaccttggcctcccgaagtgctgggattttaggcgtgagccaccactcccagctccttttttgtgatttcaaatagaatcctagagtgtagccttgagaaggctacagggagaaaaagctcagagaaatagggagaatcactcttcattatggcttcacataactgaatctatctatctatctatctatctatctatctatctatctatctatctatctatctatgtttatcttgagacagggtcttcctcttttgcccaggttggagtgcattggcacccatcatagcttgctgcattctcatactcctggtctcaagcagtcctctcacctcagcctcctgagtagctgggactacaggcgtgcaccaccactgctggctaatttttaaatttttctgtagagatggaggttctcactgtgttgcctaaactgatgttgaattcctgggctcaaacaatccttctgcctcaacctcccaatgtgatggaattacaggtgtgagccagttcacccggccactgatacattttgatgagaaagtaggtagataaattggtgaattcaccaatttattttcaccaatttagtgaagattcatcaagctgggtgtggtggctcacgcctgtaatcccagcacttcgggaggccaaggctggcagatacttgcggtcaggagtttgggtccagcctggccaacatggtgaaaccccatctctattaaacatacaaaaattagctgggtgtggtggcacgtgcctgtactcccacctcctcgggaggttgaggcgggataatcccttgagcctgggaggcagaggttgcagtgacccaagaccctgccactgcactccagcctgggcgacagagcaagactccatccaaaaaaaaaaagagggctgggtgtggtggctcacgcctgtaatcccagcactttgggaggccgaggtgggcagatcacgaggtcaggagattgagaccatcctggctaacatggtgaaaccctgtctgtactaaaaaatacaaaaaattagtcaggcgtggtggcaggtgcctgtagtcccagctactcaggaggctgaggcaggagaatggcatgaacccgggaagcggagcttgcagtgagccgagatcacgccgctccagcctgggcaacagagagccagactccgtctaaaaaaaaaaaaaaaaaggtaaaaaatccttcattagtctcatttagtacttaattatatttgatctgcaggataggtacaagcttgcaagtattctctcttagtataataacagaagatgggcttaattttcccagtaaccaattgtgagaacacatgcgaaatgcttcctggagtgtttctgggggctcatcaggtgggcactatgtgttgcgcgtgtaacaaattcccaaactctcagaaggtgggacgccagaaattttcatattttttccataaagagtttaggcaccgagctactcttacataggtcattgggctccttccccaaatccgtttcccagataccaggaatggatgtgatgcaggacaggtgcgccctaaaattggggcttatcccaggatggtttccagctttgcccagggaagaattcaagggcaggccagtggtgttagataacagtgttttatttaacagtactggtctttgtggatcagtgctaactcataggcagtacacccagagtcagcaacatatggtctcttggcaactatatttatacccactttcaattatatgcaaattaagtggtgggttatttaaaactttctaaggaaggaatgataactttcaggtcattgccatggcatttgtaagctgtcatagcattggtgggagtgttttatgctaatgagcagtgagagcatctagagatcgctgttcttgtcgtctgctggttttggcccctttctttactttatcctacctgtgccagatcttgttttggccagtagggttgtgatcagaatacaagtcctgttggtctcctacctcagatgaatgttgtgaggagtgaggagcctttttttaagggtaagcagtctcaggactgctaatataaactcttttgcatagtaggtggtaggacttcgttatgacaggttctacaggtccactgtatgagcagacattagctgggactcaggcagcacgtattactccttgcaaccaccaccaagaaagatgatcagacactgctattgttctacccgatagttccattctagtatgagagttgctgtgtggaaggaagtgagtatgatgaccaaacagtggagtaaatgtttgcagacccctgaaacatgtgaacttcttatgaattgagtacagctccccagccctgtctgtctcacccattctcctctccacatatgtgggatgtttcaggactcggtggcttttgaggatgtagatgtgaacttcacccaggaggagtgggctttgctagatccttcccagaagaatctctacagagatgtgatgtgggaaaccatgaggaatctggcctctataggtaaggattgtatacttccatcacttagcaattaaagaagaagtgcttcttgtgcagtgatgctgttccatggtttgcatcatggagggagagtacttggggggctaaaacaggcatagtcacagggtatcatgaacctagaatctaataatttttctataattttgcactaattcagaatttttctgggtctctgttttagggaaaaaatggaaggaccagaacattaaagatcactacaaacaccgagggagaaatctaaggtaatttgtactcagagaaagcaaattcacttgaaagtaccttagcatgtcatgaaattttaaaaacaggcaaacataactgataagccaagcttcaaattgatttattttttgaatattttccccaaatacatattcttcagtgtaaacagatgttcagtttttataaaaatgttcatttgtcaacagaattaagaaactatttaagaatatcactgtttgagtgatagttgcggtcaagcccattgcagagcattgaattcattcatgctcaaacaaatcagacttggcatcgagtctacgctttacctgataatattgaaaatgcaagtttaatagctattaatataaaatgattaacaaatccttagtaatgtccgtctcattttttacagaagtcatatgttagaaagactctatcaaactaaggatggtagtcagcgtggaggaatttttagccagtttgcaaatcagaatctgagcaagaaaatccctggagtgaaactctgtgaaagcattgtatatggagaagtcagcatgggtcagtcatcccttaatagacacatcaaagatcacagtggacatgaaccaaaggaatatcaggaatatggagagaagccagatacacgtaaccagtgttggaaacccttcagttctcaccactcctttcgaacacatgagataattcacactggagagaaactctatgattgtaaggaatgtggaaaaaccttcttttctctcaaaagaattagaagacacatcatcacacacagtggatatacaccatataaatgtaaggtgtgtgggaaagcttttgattatcccagtagatttcgaacacatgaaagaagtcacactggagagaaaccctatgaatgtcaggaatgtggaaaagccttcacttgtatcacaagtgttcgaagacacatgataaagcacactggagatggaccttataaatgtaaggtatgtgggaaaccctttcattctctgagttcatttcaagtgcatgaaagaattcacactggagaaaaaccctttaaatgtaagcaatgtggtaaagccttcagttgttccccaaccttacgaatacatgaaagaacccatactggagagaaaccttatgaatgcaagcagtgtgggaaggccttcagttatctcccctcccttcgactacatgaaagaattcacactggtgagaaacccttcgtatgtaaacaatgtggtaaagcctttagatctgccagtacctttcaaatacatgaaaggactcacactggagaaaaaccttatgaatgtaaggaatgtggggaagcattcagttgtatcccaagtatgcgaagacacatgataaaacatactggagaaggaccttataaatgtaaggtatgtgggaaaccctttcattctctgagtccatttcgaatacatgaaagaactcacactggagagaaaccttatgtatgtaaacattgtggtaaagctttcgtttcttcaacatcaattcgaatacatgaaagaactcatactggagagaaaccctatgagtgtaagcaatgtgggaaagccttcagttatctcaactcctttcgaacacatgaaatgattcacactggtgagaaaccctttgaatgtaagcgatgtggtaaagcctttagatcttctagttcctttcgactacatgaaaggactcacactggacagaaaccctatcattgcaaggaatgtgggaaagcctattcttgccgtgccagctttcagagacacatgttaacacatgctgaagatggaccaccttataaatgcatgtgggaaagcctttaatgctctgggttcatgtcagatacattaaaatactcactgaagagaagccctatgaatgtaagtaacgtgggaaagcatgaaattctgtcagtgccttttttaatacatgaaagaattctagagagaagccatatacatgtaagtaacatgggaaagctttcaatcattttagttcctttcaaatacatgaaagaactcatcatggagaaaaccaaacaaatgctttttggaaaggaacccatatttgagagaaaccctgggtaaagggtgtaggaaaggttttgtcatcacacaaccctgtcacacatgaatgtgtagtggagagaaccttggtaaatgtaaagagtgtgggagagcctttagtcattttagttccacttgaagccatgaaagaacacacaaaagagaaagctcttgaatataagcaatgtccacacgtttttagccagcccacatgctttcaacaacatgtaagaatgtaccctggatcaaaacactataaatgtgaaaactacaaggaaggttttccattatacttttaaagtcatttgagggctctggctctgtggctttgtgggttaaagtacttgtctggcaaacaggagatgctggatttcaatcccagcagggcctcactagttgaggtattgaatttgaacagatgttttggctctggctgggtgtggtggctcacacctgtaatcccagcactttgggaggctgaggcaggaggatcacttgaggtcaggagtttgagaccagtgtgcaaaacatagcaagacctcatctcagaaaaaaaaaaaaagtcatttgaaaacttctaatacagcaaaatcctataaatgtaagtacttcaaaaagcctcatgcatagcgggtcatgtagtctctagaaaatacataacctgatggaaatgtagaagctatatgtatattttgttaattagtggctcatatttaaaatagttctctgactatggatttcaaatgcttaatctcacaaagaaatgttaaattgatataatcctgtaagtaatctgaaagcaatagtgcatgaatttcataggtagtgttgttttaggtcagtaaataaaatatttgtctttccattttgaaatgtgtttaatccaacaatgaatttaaatgtgtttctcatattcaggtatgttaaattgtatatggttgcttaattgttctgtgattgaggaccactgaaaaataagtcttaataaatgttggtatgaacctacttgcttcatttagcaggttcttgattccctttccacattatatacattccatcatatttattggaacagctccttttttttccttttttcttttttctttcttcttttttctttttgagacagggtctcgctctgtgctctgttgcccaagctggagtacagtggcatgatctcggctcattgcaacctctgccttctgggttcaagtgattctcccaccttagcctcctaggaagctgggactacaggcatgtgccaccacacctggctaattttttgtatttctagtagagatggggtttcaccatgttggccaggctggtagaactcctgacctcaagtgatccacccacctcagcctcctaaagtctgggattacacgtgtgagccatcacacctagcccattttttttttcttggctcaaataattttattttgcttcctattaaagagttgttgttaattctaagtatgtaaagtttatcacagactgtagtctcgtgaattattattttaacctgttgttctttactccttgttatttattctggctgctctttgtataattgattttgggataaggagacagctatgatagaataataaaatctaaaatgggagatgcctttcatggattgtgtcatgtcaatctgggtaatgggaactaaacttttcagacttcatttctttctttctttctgaaatagggtctcactctgtcactcaggctggagtgcagtggcacgactgtggctcactgtaacctcaaactctggagctcaggtggccttccgacctcagcctcccaaatggctggaactataggtatgtgccaccaagcccagctaatctttttatttttggtttttcatctttttttttttttgtagagatggtgtcttgctatgttgcccagactggtctcaaactcctggcctcaagtcaccctctagcctcagcctcttaaagcactaggattacaggcataagccactgtgcctggcccagaatttctttctttcatggttacctgtagactgcatcaatagcctaaattcctggaagtttagaatgcagaagtgaagaacgcattagtcagattttggaggcatcatacggagagacagatgcatatgggctgtttggacatggtcatctagcccattttcctgattctttgccctgccaatcaagagtatcctcagccgggtgtgctggctcacacctgtaattctagcactttgggaggccaaggcggtcggatcacctgaggtgaggagttcgagaccagcgtggtcaacatggtgaaaccccatctctactaaaaatacaaaaattagctgggtgtggtgtcgcgtgcttatagtcccagctgaggcaggagaatcgcttgagccagggaggtgaaggttgcagtgagccaagatcatgccactgcactccagcctgggtgacagagtacagagtaagaccctgtctcaaaaaaaaaaaaaaaaaaaaaaaaaagagtatcctctaatccaccactagctacttcacctccatgttctcaaagttatggatttccatagatgtttttaaaagcttcatatcaaagattcagctgccatttggatattcctgaaggccctaatatatctgccaagtaatcagttcatattgtcattgttgggaatagtctgatgatctgacttggttcctgtacggtccagtttgtacataaacatttttgtccatagggacagtgagtgttactgatgcaggttgagagctacaatggcactatccaaaaacaaaacgaaaaaccctacatggagcttgttcctctgctgcattatgcagagatgggtctcaccccgttctttcatgtgagaataagcaccttattcattatagaaacattgtgggtgtttcctgttactcatagctgaatgcagtccctcagtttattttgaattatgtttgagtacatatgattacaaacaatatacatgtcctcctcaaacaaaagttctctacacatttcttagaaatattaacagtatgcaagcaacttgcatactgtctggtgagttttgtatttattgagaatatatattaaaatatcccattccaatcatggatccgataaactttataattaagctatttgtccaacattgtgagtcaatattactgtgagcttacaacttcaggcctttttttcctcataaattttagttttcatgcttatttgattacaacttttatgatgatagtagtttttcatatgcataataccaaaagtcaaatcatgttgtgagtgatttctttccaaggactatcagggacgtccctgttgtcaagcagggtgtaataaattgtggtaataaatactaccacaggccgggcgcggtggctcaccctgtaatcccagcattttgggaggccaatgcgggcagatcacttgaggccaggaattggagaccagcctggacaacatagcaacaccctgtctctactaaaaatacaaaaattagcctggtgtggtggtgcacatctgtaatcccagctacttgggagtggaggttgcagtgagccaagcacgccactgcactccagcctgggcaacagagtgagactctctcaaaaaataaaaaaataataaataccaccacaaaccagtaatgactgtaaggtgtatcaataagagggtatttaaaagaatttattgcagaacttatgctgctttttggttgcttgattcctatttaaggaagcaaaaaatttctctgtatttgatatagtgaagaggtgaacttaattctacccttggtaattctttttatttttgagacggagtcttgctctgtcacccaggctggagtgcagtggcgcaatctcagctcactgcaagctccgcctcccgggttcacgccattctcctgcctcagcctcccgagtagcagggactacaggcacccaccactacgcccggctaattttttgtatttttagtagacggggtttcaccgtgttagccaggatggtctcgatctcctgacctcgtgatccactggcctcggcctcccaaagtgctgggattacaggcatgagcaaccgcgcccggccctagtaattcttttttttttttcttttgtgagacagagtcttgctctgttgcccaggctggagttcagtgatgcgatcttggctcactgcaacctccacttctctggtataagtgattctcctgccgcagcctccagcgacagtgccagacttcgtctcaaaaaaaacccagaaaacaaaaagacaaaaacctttcagaatacttcctgaatgatctgccagagcctgttttacagctttttttctggaggcggaggggacatggtcttgctctggagtagcttggattacaggtatgtgccacgacacctggctaatttttgtattttgagtcgagacgggttttgccatgttggccacgctggtctcaaactcctaggctgaagtgatcggcccacctcggccttccaaagtgctgggattacaggtgtgagccacagcacccagctgaatatacatttttctaaggaagataaacaactgagcaaggggacctgaaaagatgctggacatcattaagtaaatgctaaacaaaaaggcaaggaaataccacttcaaacccactaggatgggtagaatgaaaaagtgagataataacacatgtcaaggatatggagaacttggaaccctcatacactgctggtgagaatggaaaatagagcagccgctttgcttttttgtttgttttttaaatttttcttttttaagagatggggttttgctctgtagcccaggctgtcaaggctcactgcactctcaaacttctggattcaagaaatcctcccatctcagcctcctgagtagctgagaacacaggtgtgcaccaccatgcccaattaatttttctttttcttttagagatggggttttgctcttttgtcagggctggtcatgaacttttgggctcaagctatcctcctgccttggccttccaaaatgctgggattacaggcatgagccaccgtgccctgccaggagtttcttttttgaggtaatgaaaatgttctaggcctggcgcggtggctcatgcctgtaatcctagcactttgggaggctgaggcgggcggatcacgaggtcaggagatcgagaccatcctggctaacacggtgaaacccgtctctactaaaaaatacaaaaaattagctgggcgtggtggcaggccctgtagtcccagctactcgggaagctgaggcaggagagtggtgtgaacccgggaggcggagcttgcagtgagccgagatggcgccactgcactccagcctgggcgacagagcgagattccgtctcaaacaagaaaaaaagaaaatgttctaggccaggtgccgtggctcatgcctgtaatcccagcagtttgggagactgaggcaggtggatcacttgaggtcaggagttcaagaccagcctggccaacatggtgaaaccccgtctccactagaaatacaaaaatcagccaagcacagtggcgcgcgcctataatcccagctactctggaggctgaggcagaagaatcgcttgaacaccagaatcggaggctgtagtgacccgagatcgcgccattgcattctgcactccagcctgggcaacagagtgagactccatctcaaaaaaaaaaaaaaaagaaaatgttctataattgactgtggtgattatctgtttgcatctttgaatatactttactgaattgtacacttaaaagggatgcattgtgtagtgtgttttattctgatatagcttttcaaataaatatgacttcagatttttgattaatctgttaagcatactaagagtttccagatataccttaatttacatcactttttattgttcatttttgtatcagtgaaaatagggattcaattaccttaggtatatcatagtcgtttacatttcaaagttctctgcgaacacaatctgtaacctatttaaaataaattttcctgtagtgtgaaatgtacacttcagagtttaattgaacatatctcacagctgtggttagtctgataagcgtccttgcatccatgctagggatgtggggttcaaagagattgtgtgtaaaaggctctggaggccaagggattctttatttaaagtaaatgtgtggggattggggaaggaatgggtggaggtctcaatgccgttagccgtcaatgtcagaatggagctagactcattacacacggcgaagtcacttttaaagtgtctgtgtttgtgaacggagctcacagttccacgagtgccctctagactcaggccaagtccctggcccccggaggagtcagaccctcttgttccaatctggacttgcctgggtgaccctcttgctgtggatttgttccttaaagggtcactacatctggcaactgaggctggaattcgccgcgcacacttttgtccccgcgttcagaaacagctgcgacaggatgccagagtccatcgagaggctgggaacaagttcggcttctactcaactgcccctcgctgggactggtttccccccggactgaagcagggtttccccggcgacatgacctttcgcagctctgtcactccatgtgaagagggcggggcttcgtgaactgtccaatcagaggcgccacgtggaaggtgggtggggcaatgcggcataaaagaggtgggcgtcgtacgtcgttacgcagcgcggttgctgggcacctcgactatcacctgaccgtagtaatatctcccgctacgcgcgttgtgaccaatgctgcatacaggagatgagggaggacggccagacacctggaagccggaaaatggtgagtgtgcggggccggtgtcccgagacctgaggagggacaggttggaaccggccggaaccggctgtggcgggacccggggctcccctcggcgactctggggtctgggacccgggtccctctggcgcagctgggccctcagtgccctcggccgcagagtggggctgggctggcatccgggaccccgggcatcctgtcccgttcctgcgcgacgcctgcggccccggcctcagcctcggcgccctctctgggcagctgcacgccgcagcctcgtgtctccccagattgcacgggagccccgggagggtcatggggaggattccgactcgtgtgtggggttcgtgcgtgggaggagcagtgttctgtgtgatcctcagtccctcctttctccataaaggtcacccatcttcccttgaggtttccaaatgtatggaaagcagggtgtcaaatccataatcctgtctccagactatctcttcctggggctggcagtaaattcctaagtttgcggatcccttcccgcattcccaaagtctaacgccccctctccagttcacagcgtcattgtcaattgtttggcctctggtgcatttcacacggacgccgtgtttctcatttttccgaagaaccagggatgactcgttttaacggatttattttttgtttgcggatattttacatgggaggaaggcaaagaatacccacctggaattgttacataaatccttatgactctccttccagtatctctcctgagcacagacacactgcaggaactcttgggttggggctcctctttggaaacttccctgggtgacctgtcttttttagcagtttcaggtcggcactgcccgtccttgactttgtattcttgaaaagatttgaccactcacttgtgtgtcattttcttcatgtatctgaaaggtatataatcaatagctactaaaagtattataattttttatttctaatttttgtgggtacatagtaggtgtatatatttatggagtacacgagatgttttgatgcaggcatgcaacgtgaaataagcacatcgtgaagaaagggatatcccctcaagcatctgagttgcaaacaatccagttacactctataagttattttaaaatgtacagttctgtgtggtttttttttccacccattaattgtcctctcctttctctcaggctcccactacctttcccagcttctaataaccaccctactctctaagtccatgagttcagttgtttgattttctttctttttttttttttttggagatggagtctctctctgtcacccaggctggagtccagtggcgcgatctcggctcactgcaagctccgcctcccgcgttcaagccattctcctgcctcagcctcctgagtagctgggactacaggcacccgccaccatgcccggctaacttttttttgtacttttagtagagacggggtttcaccgtgttagccaggatggtctcgatctcctgacctcgtgatccacctgccttggcctcccaaagttttgggattacaggcgtgagccaccgtggccggcttgtttgatttttataatagatcccacaaataagtgagaagatgtgatgtttatctttctgtgcttggctgatttcacttaacataatgatctccaattccatccatgttacaaatgactggatttcattcttttttttttatgactgaatagtactccattgtttatatgtaccactttttttttttttttcccggcagagtctcactctgtgcactggtgtgattttggctcactgcaacctccgcctacagggttcaggcgattcttgtgcctcagcctctcgagtcactgggattacaggcatgtgcctccacacggggctaatttttgtatttttagtagagacgggatttcgccatattggccaggctggtctcgaacccctgatctcaggtgatcacctgcctcggcctcccaaagttgtaccacattttaaaaatccattcatctgttgagggacacttacattgcttccaaatcttagctattgaaacagtgctgctacagatactggagtgcagccatcccttcgatacactgatttcctttcttttgggtatattcccagcagtgggattgctgcatggcatatggtagctcaatttttagttttttgaggaacctccaaaccgttctccatagtggttgtactaatttacattcccatcaacagtatacaaaggtttccttttctccacgtcctctccagcttttgttattgcctgcctttttgacttaagccattttaactggagtgagatgatatctcattgtatttttttttttttttttttttttttgtatttttagtagagacggggtttcaccgtgttagccaggatggtctcaatctgctgacctcgtgatctgcccgtcttggcctcccaaagtgctgggattacaggcgtgcgccaccgtgcccggcctcattgtagttttgatttgcatttctctgatgatcactttttcatataaacacctttttatatgcctgttcgccattcgtatgtcttgttttgagaactgtctattcaaatctttcgtgcattttttgattggattattagactttttttcctgtagcgtttgagctccttatatattctggttatattaatcccttgacagatgggtagtttgcaaatattttctcccattctttgcgttgtgtccactttgttgattgtatcctttgctgtgcggaagctttttaatttgatgtgatcccatttgtccatttttgctttgcttgcctgtgcttgttgggtattgctcaagaaatttttgcctggaccagcgtcctggagattttccacaatgttttcttgtagcagtttcctgatttgaggtcttcaatttaagtctttaatccattttgatctggtttttgtatttggcaagagataaagatctagtttcattcttttgcatatggatatccagttcccagtaccatttattgaagaaactgtcttttccccagtgtgtattcttcacacctttgttgaaaatgagttcactctagttgtgtggatttgtttctgggttctcccttctgttctgttgctctatgtgtatgtctttatgccagtaccatgctgttttggttactatagctctgtaatataatttgaagtctggtaatgtgattcttccagttttgttctttttgcttaggatagctttggctattctgtgtcttttggggttccatatcaattttaggattgttttttgtatttctgtgaagaatatccttggtattttgatggggattgcattgaatctgcagattgctttgggtaaatggacattttaacaatattgattcttacaatccataaacatggaatgtttttccatttttttggtatcctcttcaatttcctttatcagtgttttatagttttcattataaagagctctcacttctttggttaattcctaggtatttaattttatgtgtggctattataaatggggttactttttaaatgtatttttcacattgttcactgttggcatatagaaatgctactgatttttgttgattttgtatcctgcaactttactgaactcgtttattcttacagttttcctgtagagtctttaggtttttacaaatattaagattatgtcatcaaaagtataaaaaattttaaagaggcaagaaagaggtgaatttcataaaaaataaaacacttcagtattacactgaaattggtgaacatttttttctttttttcttcgccttaggttgtgtagtaagtttctgaggtctgttcttttttgtgtggtgatttcaaatggaatttcagagcatagccatacaacacctagaagtatccaaatatgattatgagaacatttattgccatagaaataataactgaaatttcttttttttttttttttttttttgagacggaatcttgctctgtcaccaggctggagtgcagtggtgcaatcttggctcactgcaacttctgcctcccgggttcaagtgattctcctgcctcagcctcctgagtagctgggactacaggcgccaccactattcctggctaatttttgtatttttagtagagtcggggtttcaccatgtttgccgggatggtctccatctcttgacctcatgatccgcctgcctcagcctcccaaagtgctgggattacaggcatgagccaccatacccggcccaataactgacatttcattttctgcaaacaatagacatttgtggatttcagggactagggctggtttgctaaggtgccttacaattttcttaacactttacacatcaatacttgatttgagagattttgcagaattcttcaaacattgggtttgtctcagttaaagtatctgtttaggctggctgtgttggctcatgtctaatcccagaactttgggtggctcatgaggcaggaggattgcttgagtccaagagttcaaaatcagcttgggcaacatggcaaaatcctgtctttacaataaaataaaaatacaatatcagtggtggtccaaagtaacatcactgcccaagctaaggccacccttgagcctgccaagagcagtaattaaaggccctgttggttcttcttggggagcctccctgttcataccattaagccctttataccaagagaagccacagagcactggaaagctggggatccacatgcacatgttttgggtggaggggttgctttctgaggttgtaattgtggttttcttgggcgtgttttttagacatgaggtttgttttgcattcacaatgttgccacattcagagtataattcttacatactgagaaagcatgtgaagttcaggagtgctgtctccaggacacagggttaatgaatttcggaggttatttttgggccagaaccttaaagtaaatccagctgagagtttcttctgcccaagaattgaagcctgggagaggaagtattttcacactgccaggggccagttagggtgtacggagctcccagagttcattcctgtggctactcaagtgtctcttcccttcatcaccagggactattccactctagaagttacatgtcagagggagagcatggacctcaagcatgttaaggtgtttaacctcttgaatgtgggttttccttgtgaattgtggggaagcagcctgcttatctgagctaattagaatatttatgtttcctttggattattttatctgttgagcattgtggcccttcaactctggtttcccttattttataattttattgcctgtgtcagtgtgtaagattttagtttctttcactttgaaaatgaaggttgttagatatggtgggagtaagcaagaaaattctggaactaaacaaaatgtttgtttcttgaggccagagaacctcaagatacgagatgagtatgtttaagttctcaggtacttttttcatttttagatcagtttttgtatgtgattgtccataaagaactttgaaatttaaaagggtatacagttgctaagacaaatgacttcctgattccgttggtaagaggaaaacacagttgaattcttgttttaattgatgtgaggaaaactactaaagtttatataatctttgaaactcctgctatatttaaattaggcccaaatccataatgcattttattttatttatttatttattgagacagagtctcactctgtcgcccaggctggagtgtagtggcacaatctcggctcactgcaacctcccagttcaagtgactctcctgcctcagcctccccagtagctgggattacagccgtgtgccaccacacccagctaatttttgtatttttagtaaagacagcgtttcaccatgttggccaggctggtctcaaacccctgacctcaaatgatcttcccaccgtggcctcccaagttgctgggattacaagcgcgaatcaccacacctggcccggaatccgtatttaatgtttgctaacaacctaagactcagcgttccctttttcccttgtgaccacacctggacaagctgatgagtctaagggctcccttctctgtcataggcaagagatttaaaccatgtaactacatgcccatacaggggatcttgtgcccaactctaccccaaccacagtaaacaaccaggccaggctcctttctttgctctctcaggccatttcagttatgcttgatgggtctgtcctgctcttcccaagatctcaacaatgtgagcaataagccttttaataccccctctgtgagtgccagaccatcatcagttttgtcagaactatgtctctgaaggtgaccacaatgattggtgccgtgagcatgttgtccagacactgatcaccacttgtgggtccttcatctctttattattattttttgagatggagtctcgctctgttgcccaggctggagtgcagtggtacgacctccgctcactgcaacctctgcctcccgggttcaagcgattctcctgcctcagcttcctgagtagctgggactacaggcatgtgccaccacgtccagctaattttttgtatttttagtagagacgaggtttcgctatgttagccaagatggtctcaatttcctgacctcgtgatctgtctgccttggcctcccaaagtgctgggattacaggcatgagccaccgcacctggcctttatttttttaattattattgttattattattttttgagacagagtcttgctctgtcacccaggctggagtgcagtggtgtgatctcagctcactgcaacctctgcctcccaggttcaagcaattctcctgcctcagcctcctgagtagctgggattacaggtgtgcatcaccacgcccgagttatttttgtagatcttctcttgctctgacttgctaacccactgtcctgcctgatggccaacatgtccagtgagctactgctggctagaaagctggtgcttcgagtgtgctgctctgtgttgcatgttgagccctaccaagtatgggttctatattcaactgactgagtctgcctttttaaaaataattctttggcatttaagagtaggactatgctattggacccctccttcaattgatgctggatctatctgtgtgtttagagtgaagctgtgcctgatgctgggttggcccggtgtgcagggtgccagggtgcagcgggagggtggactatatacaccctgtacaagaggtgctcctgaaacagtagtcatttaaagaggagagagaaagggaggaaaggcagccatcaggtggcgcactgagtccacaccccaaaaggcaaagggctcaccaggaccttaaggacctctgctgctgctgctgctgcttcaggtacctttatcacaacaaatatcctgaccctggggcatagacgggacaatatccatgattccccagtggcataacaaaggggttagtttaaacctgacataggctagagatccttaaaccctatgaaggaactattgccatggaggaggcccctaactctgatgacactgaactgagcctctctggaggaaaaaaaattgtaactgtcccattagagaaagtaccccttttccttgaagtatatccactgaccaaaaagaaagaaagaaaaataaaaacatggaaggaagggagggagggatctcttgacctcttaaactcttagcctggggaacctagtgtgaccccatgtctctcttttttttttttttaaacaatgctagtaataagagggtttaaacctctgtggtttactgatttactctattaaagtaacttatcatacatattttttatgtttgtggtgggatgctaaatattaggatgggcattgctttattttttatttatttttatttttttattatttatttatttatttattttttgagacggagtttcgcttgttgcccaggctggagtgcaatggcaccatctcggctcactgcaacctctgcctcccgggttcaagcgattctcctgcctcatcctcccaagtagctgagattataggcgtgtgccaccacgcctagctaatttttttgtattattagtagagacggggtttcaccatgttggccaggctagtctcgaactcctgacctcaggtgattcacccgtctcctctcaaagtgctgggattatgggtgtgagccactgcacctggccgatttttttttttttttttttgagacagagtctcgctctgtctatctagctggagtgcagtggcaccatcttagctcactgcagcctccgcctccagggttcaagcaattcttctgcctcagcctcccgagtagctgggattacaggcgcaggccaccatccctggctaatttttgtatgtttagtagagatggggtttcaccatgttggccaggctggtctcgaactcctgacctcaagtgatatgcccagcttggcttcccagggtgctgagattacagacgtgagccactgcccagcctgggcattgagataggtcatatgcatagggctcatatatgaggtaaacagttttttcacagaagatgcattagttgatcataccaaaattgggagtatgatacctgaattcataagaataaaattgttaatagaagcattttaataacaaaattgtgtatatttccttttgttgttgttttttgtttttgttttgagatggagtctcgctctgttgcccaggctggagtacagtggtgcaatctcagctcactgcaacctcggagcctcctgggttcaagcgattttcctgcctcagcctctcggatagctggaactacaagtgcatgccactacgcctggctaatttttatatttttagtagtgatgaggtttctccattttggccaggctggtcttgaactcctggcctcaagtgatctgcccacctcggtctcccaaagtgctgggattacaggtgagagccaccatgcctgaccatgtgtatatttctagcgtgaagataggtaatgttcctaggacaatagtagcagttagggcatttattataatagtgtattctgctatgaaaaatagggatagtagacattgaaggccaagactagttctgatttgttttgtgttaagtcaaatggggctcagttagtttctgctagcattgaaatgaatcctactatggccaggggtcatgttggtagaattaattatccaaattcttgtgtgatgataagagttgataaagtgacccgcttatcaagaaaactgttaggagaataatggctaagtcaacttctgtgggattgtctgggctaccgctcggattgtgccaattagtgcatattttgaattggatgctcatcctgatgataaaatagggtagatgcgggaggcagaggttgcaatgagccgaggtcgtgccactgcacgccagcgtggacgacacagcaagactccgtctccaaaaaaaaaagggggggtggtagctggctaaacttgatgtggctagaataaataatactcctatatttatattcagaaatggggtattaagaagtggggtgtagagagagggattcatatgcaagggttaggacgaggtaggtgtgatggtgtaaaggaggatggatggcattagtgattgtggtggttcttttctttgtttctttctccttttctttcttttctcttctctctctctcttttctctctttcatatctctttcattttgagatggagtcttgctctgtctcccaggctggagtgcaatgatgcgatctcggttcactgcaacctccgcctcccaggttaaagcgattctcctgcctcagcctcccgagtagctgggactacaggcgtgcaccccctcgcctggctaattttgtatttttagtagagacggggtttctccatgttggtcaggctggtctcgatctcttgaccttgtgatctgcccacctcagcctcccagagtgctgggattacaggcatgagccactatgcctggctataagaatttacaaaacaaaaatgttacgtctgcttggccttggggcctgtacaagatagattctgaattaattttgacatctgctctaatgcattagttgataaccctttatgggattaatcaatactaggactcaaattatagttatacctgggtatcccactaaatttaagcaagatacccctgataatcttataagttactgaatataaagtggagcacaaattagatattgctcactttaaccaacagaatagtttttttcatgcctaaattctcagttcctcattgtcatagcacttattgccctaaaatattccatagtgagagaaggtctgaaccaatgagtcatgaatttaaatggtcttttaaattaaactttttttttttttttgagacggagtcttgctctgttgcccaggctgcagtgcagtggtgcaatctcggctcactgcaactttcgcctcccgggttcaggcaattctcctacctcagcctcctgagtagctgggattacaggcacccgccaccacgttcagctaatttttgtatttttagtagagacagggtttcaccaggttggtcaggctggtctcaaacccctggcctcgtgatccaccggcctcggcctcccaaagtgctgggattacaggcatgagccaccgcacccggcctaaacttctttatttatttttatattttgtagagacagaatctcactatgttgcccagagtagtctttttgtttgtttgtttgtttgtttgagagagtgtctcgctctgtcgcccaggctggagtgcagtggagcaatcatggctcgctgcagccttgacctcctgggctcaagcaatcctaccgtctcagcctcccaagtagctgggactacaagcacgcaccaccatgcccaactcacttttatatattttgtagagacagaattttgccatgttgcccaggctgacaagtgggcatttctttttttcttctttttttttttttttaaaaataacttttattttaggtttgggggtacatgtgaaggtttgttacattggtgaacttgtgtcatgggggtttgttgtacagattatttcatcacccagatactaagcccagtatccaatagttatgttttctgctcctctccctcctcccaccttccactgtcaagtagaccccattgtgtgttgtttccttctttgtgttcatcagttctcatcatttagctccctcttataagtgagaacgtgcagtatttggttttctgttcctgcattagtttgctaaggataatagcctccagctccattcatgttcctgcaaaagacatgatctcattctttttttatagttgcatagtattccatggtgtatgtgtaccacattttctttgtccaatctgtcattgatgggcatttaggttgattccatgtctgtgctattgtgaatagtgcaagctggcatttctaaaggtaagcagtcttaggagtgttatatgaacttctgtctgcacactaggtagtaggactttgtgatgacaaggtctgcaggtgcattgtaggagaggacttgggtgcttccagtttttcattgtgtgtgttttgtttttgtttttttttttgctttgtttttgtttttttgtttgttttgtgacagggtcttactgtgttgcccaggctgctctcaaactcgtggctctagtgattctctgcctcagcctcctgagtagtcactgtttttattcattaaaatcttgtctagattcaactgtttgcttcatagactgttatgtgatatggtaggtaatatgagaagagagaaaagagtttttctcacaaggtgctgaagcatcttattgcttctttagtgtaccatttctgtcatttcaccaaggtgccttctaccctgtcattagcagtaagatgtgaagtgatcacagcaaaaatgtagaaataatttccatgtctccatgatgctggtgaatttatgagtggctgtgggcagagaatgtcttctgatgacatagtaataaaataaatattttgggatcacagagtcatgtgattatcttacaaattgattatagatccccagccctgtcagtctcacccattttcctctacacatatgtgggatgttttaggactcagtggcctttgaggatgtggcagtgaacttcacccaggaggagtgggctttgctggatccttggcagaaaaaactctacagagatgtgatgctggaaacctataggaacctggcttcagtaggtgatgacgacaacattccttcacttagagaacaagttgcccatcaacgatatttcaagacctggcatgtggaaagggaatacttcagtaaataaaccaagcatggtgacagctaattagatctagaatctaatagtttttctataattaataatgatttccaatgatttttctgggtctgcatcatagggaaaaaatgtgaagagcataacattgaagatcagtccaaaaaccaagaaagaagtctaaggtgagtggcactaataagagttccatgagagagacttagtgtgtcatgaagttttaaaaacaagcaaagaaaacaaataagcccaccttcaaatgtggcttattcttggaaaatttttacccaaagtgtttacttaaatatgacatagatattcagtgtttgaaaagtagttcatttgatagcaatattaagaaactccatttatgaatattactgttttgatattacctgtggttgagccctcttccagaacattcagtctattcatcttcaaacaattcaggcaggactgaagttttaatttctgaaaatggtaaaaaatgtaattcctttacctattaataaatataaaatctttactaaagaaatcattatcatttcttacaaaagtcatgtattgtagacagactgtgtgtgaaaatagatggattagctaatcaaagtgaagaaaacttcagccagatctaaattttaatctgagtatgaaaactcctcctggagtaaatccatgtgaatgcagtgtgtgtggaaaagtcttcatttgtcattcatcccttaataggcacatcagatctcacactggacacaaaccatatgagtgtcaagattatggagaaaagccgtatagatgtaaggaatgtgggaaggccttcagttatttccagtcatttaaaaaacatgaaagaaatcacagtgaagagaaaccctataaatgtaaacaatgtgggaaacccttcagttatcgtcaatctgttcttagacatgaaaggactcacactggagaaaagccctatgaatgtaaaaaatgtggaaaaaccttcagtactcttacaggtttccaaatacatgaaagaactcacactagagagaaaccctatgaatgtaaggaatgtggaaaagcctttatttaccttgcaagctttcaaagacacatgataatgcacagtggagatggaccttataaatgcgaggagtgtggaaaagcattcagttgtcctagttcatttcaagtacctgaacgaattcacactagagaaaaaccatatgaatgtaaacaatgtggtaaagccttcagttggcttggttcctttcgagtacatgaaagaactcacactggagagaaaccctgtgaatgtaacgaatgtgggaaagccttcatttatcgaactacgttaaaaggacacatgaatattcacactggagagaaaccttataaatgtgaacaatgtgagaaagccttcctttctcttgcaagctttcaaatgcacatgataatgcatactggagatgcaccttataaatgtaacgaatgtgggaaagcattcaattgtcttaattcatttcaaatccatgaaaggactcacactggagagaaaccgtatgaatgtaaacaatgtggtaaagccttcagttgttccagttcctttagaatacatgaaagaagtcatagtggagagaaaccccacgtatgtaaacgatgtggtaaagccttcatttggcacaattccttttgaatacatgaaagaacccacactggagagaaaccctatgtatgcaagcagtgtggcaaagctttcatttattgtacaacttttcaaggacacatgagaatgcacactggagagaagccctataaagtgtaaagaatgtggaaaagccttcagtcatcccagttcatttagaagccatgaaaaaatacaccctggcagaaaacttcttgaatgtaagtaaagtgggagttttcaacttgcccacctccttacaaaaacatgcaataagaatgtgctagatataaagcttacaaatgtgagaaatacaggaagtttttcagttttaacaaatactgtcaaagtcatgtgaaaattctcactagaaagaaatccaataaaggcaagttgaggcatacctgtttgttattcaggaatttgctataaggttatactgggggagggggtgccatgtttaaattcaatggtatcttaaggtaaaactgtaatttaagccccagtattgattaaggacatggaaatttgccaactgatgcatttcaacggatgttgaagttaattcggagcctgttttgtagaggtgtgaaacccagtcagcacccatttatttttttgctgttattttaataaactttggatttctaatttgatcaaattatggacctttgtctcaatttttttcttttttcttttggtgattgcagggtgagggagaggggtgttctgtgtaccctacttatatttatatccttcattctctagagagcctcaagtcagtgtcatcatggttatgggcctccctcatggcagtggttgctttagagggtttcaggactgtgggcttaagtctgatttaaattaagggtatctctctgaagtctctattctattcctttgctctgtttttttttttttgtctttctttcttgagacggagtctcgcactgtcacccaggctggagcgcagtggcgcgatcttggctcactgcaacctccgcctcccaggttcaagcgattctccttgcctcagcctgagattacaggtgcccgccaccacgcccggctaatttttttgcagttttaatagagacggggtttcactatgttggccaggctggtcttgaactcctgacctaatgatctgcccaccttggcctcccaaagtgatgggattacaggcgtgagccaccacacccggcctccattgctctatatatctgcctttatgtcatgtcaacaccacactattttgattactgaaacttagagtaagttttgaaactaggaagagtgaggcttccagctttgttgttctctttttcttttcttttcttttttttttttttttttttttgagacagagttttgctcttgttacacagcctggactgcagtggtgtgatctcgggtcactgcaacctctgcctcccaagttcaatctattctcctgccttagcctcctgagtagctgggattacaggcatgtgccaccacacccagctaattttgtgtgtgtgcaatggctcgatctcggctcactgcaacctccgcctccctggttcaagcgattttcctgcctcagcctcccgagtagctgggattacaagcatgggccaccatgcccggcttatttttttgtatttttagtagagatggggtttctccttgttggtaaggctggtctcgaactcccgacctcaggtgatctgcctgcctcagcctcccaaagtgctaggattacaggcatgagcctccgtgcccagccaaaacttagagtaagttttgaaactaggaagagtgaggcttccagctttgttgttgtttttctttttttttttgagacggagttttgctcttgttgcacaggctggagtgcagtggtgtgatctcgggtcactgcaacctccgcctcccaggttcaatcgattctcctgcctcagcctcctgagtagctgggattacaggcatatgccaccacacccaactaattttttgtgtttttagtagagacgaggtttcatcatgttggccaggctggtctcgaactcctgacctcaggtgatccacccaccttggcttcccaaagtccagggattacaggcgtgagtcaccatgtccagcctgttgttctttttcaagattgttttggctatttggggtcctttgagattccctgtgaattttaggatgagtgtttctgtttccagaaaaaaatgtcatgggccttttgataatgattgctttgaatttgtagagcatttgcagtaatatattgacaccttaacaaaattaagtcttttaaattatgaacacagaatgtctttccatttatttatagctttaatttctttcagtaacgttttatagttttcagtatacaagtcttttgcttttttggttaattttttgtcatggcgttttgctgcgttgtccaggttagtctcaaactcctgggctcaagctgttctcccatcttaggatcttcagtagctaggactgcatgtctgtgtcactatagctagctgtttttttgtttttgtttttgttttgagacagggtctcattctgtcactgcactgtagtgcagtggtgaaatcatggctcactgcagtctcaacctcctgggcttaagtggtcctcccatctcagcctcccagtagctgggagtacaggcacaggccagcacgtccagccaattttttttttttttttttttgtagtatgaggtctcactttgttgctcaggcttgtcttgaacttctgggttcaagtgatcctcccaccttgggccttccaaagtgctgattttgcaggtgtgagccactgtgcttggcctgttttattctttttgatgttattactaatgtaattgttttcttaatttccttttcagattattaactgttagtgtattgaaatgtaattttaggctgggtgcagtagctcacacctgtaattccagcactttgggaggctgaggcgggtggatcatgaggtcaggggtttgagaccagcctgaccaacatggtgaaaccccgtctgtactaaaaaatataaaaattatccgggcctggtggtgggcagctataatcccagctactcaggaggctgaggcaggagaatcgcttgaacctgggaggtggaggttgcagtgagccaagatcgcaccattgcactccagcctgggcaacagagcgagactccgtctcaaaaaaaaaatgtaattttaaatgttaattttgtaccctgcaactttgctgaattcatttatgagttcagtttttgtgtacatatatgtgtatgtaatctttaggattttctacacataggattatgtcatctgccaacataattttatttcttccttgcccatttggatgccttttgtttttcttttttttttttttctgagacagagtctcactgagccacccaggctggagtgcagtggtgcagtcttggctcactgcaaccaccgtctcccgggttcaagcaattctcccgtctcagcctcccgagtacctgggattacaggcacccgccatcatgcccaggtaatttttgtattttagtagagacgggttttcatcatgttggacaggctgatcttgaactcctggcctcaggtgatccacccgcctcagcctcctaaagtgctaggattacaggcgtgaaccactgcgcccaactggatgccttttctttttcttacctaattactctgactagctcttccagtactatattgaatggaagtggtgaaagcagttatcctatcttgtttctgatcttaggggaaaagatcaccatgtttatatttcaccattaagtatgatagtcttgtagattcttcatatatggcctattacattgacctagtttcctcccattcctagtttgttgtttatcatcaacgggtcttgaattttgtcagatgccttttgtgtatcaattgagattactgtgatttttccgtcattcggctaatgtggtatattatattgaccgattttcataggatgcactgtttgcattctggagataaatctcacttgatcatggtttagaagtttttaaaaaatacagatgtagtcttgctctgttgcccaggctggagtgcagtggcatgatcataactcactgtagtctccaaactcctgggctcaagcaatcctcccacctcagcttcccaagtagctgggactacaggtgcatgccaccacacctggctgatttttgtatattttgtagacacagggtcttgctatgttgcttttcatatgcctgtttgccatttgtatgtcttcttttgagaaatgtctattcaaatcctttgcctattttttgaccagattattagattttcttcctatagagttgtttgggctctgtatatattgtggttattaaccccttgtcagagaggtagtttgcaaataaatattttctcccactcggtgggttgtatgttcactttattgattgtatcttttgctatgcagaaacttttgtaacttgatgtgataccatttgtccatttttgctttggttgcctgtgcttgtggggtatgcccaataaatctttgcgtagaccagtgtcctggagattttgcccagtgttttcttgtagtagttttatagtttgaggtcttatatctaagtctttaatccatttcaatttttgtatatggtgagaggtagggatctagcttcattcttctgtacatggatatccagttttcccagcaccatttgttgaagagactgcctttccccagtgtatgttcttggcacctttgtcaaaaatgagttcactgtgggtgtattgatttattgttgggttctcttctgttccattggtctatgtgtctcctttcatgccagtaccatgctgttgtggttactatagctctgtagtgtaatttgaagtcaggtaatgtgattcttccagttttgttcttttggtttaggatagttttggctattctgtgtcttttatggtgccatataaattttagggttttttttttctatttctgtgaagaatgtccttggtattttgagagggattgcattgaatctgtagattgctttaggtagtgtggacattttaacactattgattcgtgtaatccatgaacatggaatatctttccattttttggtgtcctcttcaatttctttcctcagtgttttatagtttttattatagagatctttcgcttctttggttaagttggtttcttggtaaaatttaattttacatgtggctgttgtaaatgggattaatttcttatttctttttcacattgttcactgttgacatagaaatgctactagttttgtatgttgattttgtatcttgcaactttactgaatttgtttattcgttctaattgttttcttgtgaattctttaggtttttccaaatataatgtcatataatcagcaaacagataatttgacttcttcctttccaatttggatgccctttgtattttcctcttgtccgattgctctagctgggacttctggtaccatgttcaatgacagtgtgacagtgggcatcctttttgtgttccagatctttcgagaaaacgctttcagttttcccccattcagtatgatactagctatgggtctgtcatatatggttgtgattatgttgaggtatgttccttctatacccacttttttgagggtttttattatgaagggatgttgaattttatcaaatgctttttcaggatcagttgaaatgatcgtatggtttttatccatcattcaggtcatgcaatgtatcacactggttcatctacataggttgatccttgcatcccagagataaatcccacttggtcatgatgaatgctctttctgatgtgttgttgaatttggttggtattttgttgaggatttttacatcaatattcatcagtgatattggcctatagttttgttttttttgatgtgcctttggttttgttatcaaggtaatagtggccttgcagattgagtttggaagtattccctactctgttttttggaatagtttgagtaggattggtattagttctttaaatgtttggtagaattcagcagtgaagccgttgggttctgagtttttctttaccgggagactttttattatggcttcaatcttgttacttgttattggtctgttcaggttttggatttcttcctgattcaatctcagtaggttgtatgtatctaggaattttttacattttttctattttttccaatttattggcatatagttactcatagtagccactactgctttgaatttttgtaatatcgtttgtcttctttttcatttctaatttatctggatcctctttttttcttatttagtctggctaaatgtttgtcaattttgtttaacttaaaaaattgatgttttggccaggcgcagtagctcatgcctgcaatcccagcactttaggaggctgaggtgggcagatcacgaggtgaggagttcaagactagcctggctaacatggtgaaaccctggctgtactgaaaatacaaaaattagctgggtgtggtggcgtgttcctgtaatcccagctactagggagactgaggcaggagaattgcttgaactgggacctgggaggcggagattgcagtgagctgagatcgcaccactgcactccagcctgggctacagagcaagagtccgtctcaaaaaaaaaaaaaatggtcttttgtattttcatttacttctgctctaatctttattatttcttttcttctaccaattttgggtttggtttgcttttgttttctagatcttcaagatgcattgttagattgtttcaagttcttcctcttttttttttttttttttttttttttgagatggagtctcactctgtcaccaggctggagtgcagtggcaggatctcggctcactgcaagctccgcctcccgggttcatgccattctcctgcctcagcctcccgagtagctaggactacaggcacccgccaccacgcccaggtaattttttgtatttttagtagagacggggtttcaccgttttagccaggatggtctcgatctcctgacctcgtgatccacccgcctcggcctcccaaagtgctggggttacaggtgtgagccaccgcgcctggcctcttcctcttttttgatgtaggcatgtagtagctataaacttccctctgagtactgcttttgctgtatcccataggttttggcatgttgtgttgccattatcatttgtttcaagaagttgtcccattttcttaatttcttcattgacccactggtcattcagtagcatattgtttaatttccatgtatctgtatagtttccaaaattcctcattatttatttctagttttattccattgtggtcagagaagatgcttgatattatttcagtatttttttaaatttttaaatttttatttatttatttatttttagacagagtctcgctctgtcaccaggctggagtgcagtggcgcaatctcggctcactgcaaactccgccttccgggttcaagtgatttttctgcctcaacctcccaagtagctgggactaccggtgcatgccaccacacctagctaatttttgtatttttagtagagacagggttgcaccatgttggccaggatggtctcaatctgttgacctcgtgatctgcccaccttggcctcccgaagtgctgggattacagatgtgaaccactgtgcgtggcctttttgaatgttttaaaactcattttgtgaactatatatggcctatccttgagaatgatccatgtgctgaggaaaagaaggtatattctgcagcttttggatgaaatgttctgtaaatatctattagatccatttgatctatagtgcagattaagtctgatgtttcttcattgattttctgtctggaagatctaagtctgaaagtggggtgttgaagtatccagctcttattgtatcagggcctctctctttagctctaataatctttcctttttatatctgtgtgctccagtgttgggtgcatatatatttacaactgttatatcctcttgctgaactgacccctttattattatatagtgaccttctttgtttcttcttaacagtttttgtcttgaaatctattttgtctgatataagtatggcaactactgctcttttttggtttccattagcatggaatatctttttccatccctttattttcagtctgtgtgtgtctttataggtgaagtgtatttcttgtaggcagcagatcaatgggttttggtttttcatccattcagccagtttgtgtctttggattgcagagtttagtccatttatattattgttattgataaataaggacttactcctgccattttgttatttgttttctggttgtttagtggtcttctcttcctcttttcctttcttcctgtcttcctctagtggaggtgattttctctggtgataagattcagtgtctttttattttttgtgtatccattgttttttcggtttaaggttaccatgaagcttgtaaatactatattttaactcattgttttgaactgataacaccatttgcataaacaagcaaaaagaaaataaaaactctacaacttggttcacccccttttaacttttagttgtttctatttatatctaattgtactatgtcttgaaaaattatgtttattatttttgagttgttcactgtttaagtctttctacttaggacaggagtagtttatgggctgggtacggtggtcatgcctgtaatcccagcactttgggaggccgaggtgggtggatcatgaagtcaggagatcgataccatcctgggcaacatggtgaaaccccatctctactaaacatacaaaaattttctgggcatggtggtgtgtgcctgtaatcccagctactcaggaggctgaggcaggagaatcacttaaaccagggagttggaggttgcagtgagctgagatcgtgccactgcactccatcctggcaacagagcgagactctgtctaaaaaaaaaaaaaaaagtagtttacatagcacagttacaatgttacaatattctgtattttcctgtttactattactagtgagttttgaaccttcaggcgattatttattgctcattaatgtccttttctttctgattgaagtgcttcctttagcatttcttgtaggactggtctggtattgatgaaatccctcagcttttatctgggaaagtctttatttcttcttcatgcttgaaggatattttcaccagatatactcttctagggtaaaagttttttccttcagcgctttaaatatgtattgccactctctggtggcctgtaaggtttccactgaaaagtctgctgccagatgtattggagctccattgtatgttattgtttcttttctcttgttgctttttaggatcctttctttatccctgaactttgggagtttgattatgaaatgccttgaggtagtcttctttgagttaaatctgcttggtggtttataacctttttgtacttggatactgatacatatctctagtttgggaagttctctgatatcactttgaataaactttctacaaccttttttctacttcctctttaattaaatcttagatttgcccttttgaggctatcttctagatcctgtagatgtgcttgtttcttactcatttttcttgtctcctgactgtatatttccaaatagcctgtcttcaagctaattctttcttgtttgatcaattctgctactaaaggagtctgatacattctttagtaagccagttgcatttttcagctccagaatttctgctcaatttttaattatttcaatttctatgttaaatttatctaatagaattctgaattccttttctgtgttcccttgaatttctttaagtttcttcaacacagctattttgaattctgtctgaaagatcacatatctgtttctccaggattggtcccctggtgccttatttagttcatttggtgaggttatgttttcctggatggtgttaatggtagtagatgttctttggtgtcttggcattgaagggttaggtatttattttggtcttcactgtctgggcttatttgtagctgtccttcttagggaacgctttctagatatctaagttatatctgctttagggggcaccccaaacccagtatgctgtggttcttgcatactcatagaggtgctgccttgatggtcttggacaaaatctgggagaattctctggattaccaggcagagactcttggtctctttccttatgatctcccaaacatagtttctttctctctctgttctaagccacccaaggctgagggtggaatgacaccagcatccctgtggccaccaccactgtgactgcactgggtcagacctgaagccagcgctgcgtcttgcccaaggcctgctgtaaccactccctggctactgcctgtgttcactgaaggcccctggggtctacaatcagcagatggcaaaaccagccaggcctgtgtccttcctttcagggtgacgaggtcccctaagccccaggtgagtccagaagtgctgtccagtagtcagggattagagtgaaaaaaaccttagaagtctgccttgtgtcctgttgtattgtggcttggctgagctggcactcaaactacacaagtccttccctcgaaaggcagaggaacctcaccccatagccaccgccccaagccacaaggagttctgtcagagtactgctactgctcatgttcccttagggctaaaggtctcttaagtcagcttgtcatgaatgctgcctcttcagggcagtgggctcccctctagcccaggacaggtccagaaatgctatcgaagaatcaagttctagaatcaggggccccaagaacctgcttggtgctctgcccctctgtggccatgctggtgcctaaggtgcaagacaaggtccccttacttttccctctgcttttctcaagcagaaggagttttcctctgtagccaccacaactggttatgtgctgagtctcacctgaagccagcaagtctcagaggctcaccaaaggcccttcatgtagtgcctgggtatcgttactggttattcagggtccaagggctcttcagttaacaggtgattgctggcaggactgggtccttcccttcaaggcggtaggttcccttctggcccaaggtgtgtctagaaatgtccgcgagctaggccctggaacaggggcctcctgattctgaccagtgccctgtcctactgtggctgggctggtatccgagatgtaagatacagtccccccaatactgtctcctccctcaagtagaaggggtctcttttttagctgacagctgtgcagcctggggttaaaggaggggtgatcccatatgtcaccacccctccctgccccctgtcggttcactgactctgggcctaattcagcactaggactcacctaagagttgcagtcctcatgggctagactgcctttcaactttacttggagagagagagtgctgcagccctcagcaatgcggtttgcaggtgcttaagttcagaccactgggatcagcagttcctccctggctaaggctggttaagtgcccctccgtgggcaggtatcagctgaatttggtctgattttcctttctgctctaacaggacagcactgagttcagtgcctcacaattgctgtgttctccctcccacagcacctagacttgctctctgcatgatgctgctgttgctgggggtgggagaggggtgctgttggtgattcaggactgttttttaaatcgcttcattgcctctttcagcgatatgaagttaaaaccaggtactataagtgcttacctgatttttggttctcatgaaggtgttttttctgtgtgatagttgttaatttggtgtccttgcaggaggatgatcaggggagctttctattccgccatcttgctctgtccctttctatagtttaaaatatttgaggtatgttagggaaggtctcatcttgtttttcagaaagcaaaactgtttttattcattattcctataacatttggtgaatatgtatcactacacacctcagaatggctaaattccaaaatataacaccaaatgcttccaaagatgcaaacaaaggaacattcatttctgtggtaattcaaatggcagaggttgcagtgagccgagattgcgccactgcactccagcctgggtaacagagcaagacgctgtctcaaaaaaaaaaaaaaaaaaatcacaaagtgatcccatttcacacaaactacaaactagataggcaaaaatacattattccacgactggcaacactagaattatctaaatatacatgcaagagtggtgggacggtcaattcatgtactccattgggacttggtggcaatcttaaagttgctcagaatctacaacccagcaagttttctctaatgtatagagaatttactgtgcacaggcacatggggacttaaagtatgattagagcagcattttccataagaacaaaacacaaaattgaagcaacatgaatcctatagatactggaatggatgagcaaattgggtagcccaagcctcagacaccagcatgtgtgaaacaactgggacaaaaaccaaggagacgcccatccatgatttccttccacagaaagtgctaaagaggcaaacttaagcaaaacactgcttggtgataaaataatggcatagccataaagaatatccacaaaattaagggcagtggtcacctctggggacaagagggaaacaaagtcaaggtggagcagcactgggagctgtgacatgcccagggtctgttcattctgagtgcccagtctacggaagtttacagttatgattaaacataaaacattctacgcattctataagaagtatgctatatttcactataaaaatataattcagctgagtgtggtggctcacgcctgtaatcccagcactttgggaggccaaggcaggaggatcatttgaggccaggagttcaagaccagtctgggcaacatagtgagacctccatctctaccaaaaaaataattctttaagtttgaaaaataactttcaaatatttattttgccatgttttctaactaccttcccagttctcatttcactgccttagttcagtacagatttctaagtcttttagattgtacctattgctattcatcttgattacagcaagaaatgactagcaaaagaatgggaacatattcagtgtttaatagagaactgactatataaacttccatcttttaaaaaaatatatttattaaaacattttttggggggagacagggtctcactctgttgcccacgctggaagtatagtggcacatagttcactgcagccttgaagtcctgggttcaagtgatcctcccacctcagcctcccaaggaactgggactacaggcatgtgagccacacaactggctcaacttctatcatcttgtgaacctttataaaaattagggaaggcaccaatgaatatgaaaaagctgcaggatttattttcaaatgaacaaaaaagcaaagtgtgtaaaccatgttgccttttatagtgaggaaagaaaaatatgtaatttaaattgctttttatgtaaatgccggacaagaaagtaataaaattgttatctttgggaacctgaggccactagacacgaatgctagaggacatgctaagagtgagccttcaggtagactgcttctaaatctcaggctgggttttgggtgggtgggtgtgtgtgtgtacacacagggttttttgttttttttttttttttgtagagacaaggtcttgccatgtttcccaggttggtcttgaagtggcctcaggtgatcctttggcctcaccctcccaaacagatgtgagtcactgtgcccagcctcaggctgaatttttgaatcttaacattgactataaacaatgattaagaaaatttgcattaagtatattttaatagttcataaatcaaatgactaatttttaacaggtaactagttctttgtgttttatggtcctctaaagaagttttatgaagtgagcagtatgtttttgtaaaccataaaaagttgttatgcacataaagatgggagcaatggacgctggggactgctggaagggggagggatggtggagagtgagggctgagggaatgcctgttgggtgctgtgctcactgccaggatgacaggctcacccatagcccaaacctcagtgtcacagtgtgcccatgtgacagacctgcatatgtaccccctgaatctaaaagttgaaattattaagaaggtaaattgaaatgtattttttttgtgatatgattcctgatgtttgtgagatgtgggtttgtgtattccatcccaggaatctttaaaaaataaacgttaacaaaaaaatttttttatcacttgagctcagaagttcgagaccagccagggcaacatagcaaaaccccatctctataaaaatttttaaaattagccaggtgtggtggcatgtgcctgtagtcccagctacttaggaggctgaggtgggaggatggcttagagcttgggaggcagaggttgcagtgagctgagattgtgccactgcactccagcttgggcaatagagcgagacatgtctcaaaaaaaagaaatgaaaaaaataattttaaacatttggttcttaaattacaagtgatattacaggttgcactgccatcacatatagggcattttttgatctgggcagaatcttaaggcattaggatggcgtaacagtatgaggagcttcactaacccactccccagagacacttatgacagttactttaaaacaaccatttaaagcccctgaagtcatcctaaaggcaaacagccagtgaggaaacctattcaagagaatctgtgaaaattctgtgagaaatgtgagtttgtggtatttaaacccttactgttccctgatcctgtaccccacatcctcaccccagtgaggtgaacactccactctagactgtgtagccaaggatacaaggttctctctttctagtgtaagagttagagttaaagaggaaagaggctgggcgcagtggctcacacctgtaatcctagcactttgggaggccaaggcaggcagactgcctgagctcaggagatcgaggccggcctgggcaacatggtgataccgtttctactaaaacacaaaaaattagccaggcatggcagcctgcgcctgtaatcccagctactcagaaggctgagacaggcgaatcacttgaacccaggaggtggagcttgcagtgagctgagatcacgccactgcactccagcttgggcaacagagcaagactccgtcttaaaaaaaaattaaattaaaaaaaagaggaaagaaacaccgaacactgcttgacagtcaaagacaggtttattatagaaaagacctgagagaggattctggctggtcagtcaggagcacttttccttgcagactaagaatgtacgttggttttagggtgagggagcttattacaagcttggaatgtttctgtgtgggggagaagtttgtggcagggttggaatgttctgggcggaggggtggttatcttgggggtgacatctttccggcaggagaggggttatcccgaggctagcatttctctgtgggaggtgtctggaatgtttttggttggagatgttatttgtggtttgtgatcatgctgaccttagccattaggctgatgccctttggatttaggcagtttttgattaaggtgaattttaaaatgaggcgcttatccacaatggtgatgcttctgctctgtcaatccagacctcatagttataaaaaggacgaggggcggcatgttctttctggctacttcctgctgacgaggggacagagagttctctggtatcgggttggtaggagcagtgccgtctgtagatatttttgggtagttgtctgtgaaatggccatgatcctgtcagtttaaaaaatctctgaaaaaggttaattaggcagggtaagaacattagtcccataattaggtatattattaggagagggcccaggaatgggatgacccatgctatctatgattttgttcccaaaccaagaatctgtttgtttgttttggtactccttagctttttagcttgttttttttaatagcgctttttactaggtctgattggctgatatagaaacaacattcctttcctaataagaggcagaggtgctggtttggaaaggcccatgtgttattttctgttagtaaccattattcccgctatgaggataataattaagcgaaatgctatggtaattgagattctgtgtctgatattttaccctgagggtgctacagtatatagtcctactgcaaatagtagagtgagtaaagcaattcccacacgggtggcgtagtaaataatttccattaaaaagttttaatatttggcttaaaaggagaggtaggaacgataaaagtatttgatgaggtaggggtgagactgaataggatgagtaattctctcttggttacttattttagcttaaggtttcctatttatttcctccggtgagagtcgggggcttagaggcagcgcctgctgaaacatcaagttttcagtttatagggctttcagaaagcacagctattttggaaacttgtagccagaaaaattagaatttaatttaaacagaaaatagtaagaattgaaaaacattaggcaacaccaggatttaacaacatgtgtgctatcgtttttgaaacataattttctctctcaagtttaccattttcattaaaagacaaatcataccagtaggactgattttctttattatacttggcttagttatttgcatacagtggagcaagaataattatttgttacttaggtcctttaaattggctttgatggaactttgttttgtagaaggaatgtgagataagacctttttaaaggcaaggccagccatagatttgtaccactgaatacctatgagttgggagaaatcctctcttcttgaggttctaagataacttgggactcctggcctgtcagaaagtgacattctttacttaccacagatcggaaaccctgtacagggactgtacatgaaatctgaggccagctttccaagggctttattggctccataagtcaaatttgattccttaaaggaaggcacaccattccagttaaagccttggtaaaataaccagttttcccaattgtgtcctgttacaaaagaaaacagattcttgttgcacttatgcaaataactatattaccctaacttaagaatacatacagatagtttccaaattctggagaaaatcaggtagagagaaacaagaatgctccaaattttgttcatggaagcatactaaattgttaaaagctgtcaataattcaaaagaaaagattcttggactttgaaaagcaaaacaaagaattagcaatattttaagcaatacgttaaaaagatcactccaggctgggcgtggtgggtcccatctgtaatcccagcactttgggaggccaaggtgggtggattacctgaggtcaggagttaaagaccagctgggtaacatggggaaaccacatctctactgaaaatacaaaaattagccgggtgtggtggcgaacgcctgtaatcccagctacttgggaagctgacacaggagaatcgcttgaatgtaggaggaggctgcagtgagccgagatcatgccactgcattccagcttgggctacagagcaagactctgtcttaaaaacaaacaaacaaaaaagatcactccagtctcctgcagtttagttcatgcagttaattcctgtcctgattcatattaacattttagctttttaagagttctgaacgtttttcctctattgtgatatcacaattttcagaaacttgcattcaagggcacctgttagacctttatagctgattataaaaccacctttttaaagaggaccaaaacaagacaacaattgtttatggatgacagaaagttttaggataggccgggcgtggtggctgatgcctgtaatcccagcagtttgggaggccaaggcaggcagatcaccttgaggtcaggagtttcagaccagcctcaccaacatggtgaaacttcgtctctactaaaaatacaaaaattagccaggtgtggtggtgtgcacctgtatgtaatcccagctactctggaggctgaggcaagagaattgcttgaacccaggaggcagaggttgcagtgagccaagatcgtgccattgcactccagcctgggcaacaaaagtgaaaatccgtctcagaaaaaaagttttagaatagccatacttaaagacgcaattgacaaggatatctgttacctttgtggcacacaataattttaacataacaattataattattacttataaggtacactaagatatgtcagaattataggagtctcccataactttgaaacacataccaataacatacttatacaaatatagcccaaagaaagccaaacaccattttgtatttgacaatgcttcctgtatgattttataccaaatatgccaaattttaccattatagtagtgtgctatgaatattaaactccatttttaataaaaccttgtagatgcatttactcaattttaatgtttgaccataaggtaagatttttatagaccctttttaaccctttataatttttgttaaaaagcaggttagtgcttaagagaaacccgttgtgtttttattttaatgctcaatttacagaaaaactagatgctaccccttcaactttagccaatatgtttacacagaatttcctttacaattaacctgccaaaacgtgcttaaaccttcaaaacaattgtttaacttaacttttttaaaccttcaaaacaattgtttaactttttaatgtaggtaaaaatccacattctcatgcctccttataatctttttaccaaaagtgtattttactttccttacacactttccacataattaactttcagtaaagtttacttttgttgaaaaccttggtaagtttgggattttaattatgtactaggtgtagagcctaggacctagacttctgtgcagataaggtctggcttagtccagcatttaattccgtgtgtcctaggttttacctagctgcaaagcaggcaagttgtacaggtaagagttataggggcattttataaagcagtcaggaggcctaatcacttttaaattgtacatttcttgcataaattccatttataaaatttttcatgcctttcacagtctgacatgcctcaactttctgacttgttgtaaacatctctctctttaaacaaccagttaatttactttagtacaaaaatttaccatataaaatttttaaatataaattatcttttaatataaaagataccagtcctttcccaaaacaaacttccttcatgcctgtggactagactgcctaagtccataagattagaagttaggatattaaatggcttaggatgtagctattttcattaaaccaatattaatgtttcacttattaaaaaattatacaaagattattttgtttgggctgagtcatagttttgtttgttttgataccttatagtatttggcagagataagaatgaaattgcttgattaataaatgcaaacaaaaacatatgctggtaactcttaagacagttctaactttactgtaccagtaagttttaaagattaaagtcatgtgaactgaaagatcccacagcttttacttttcccttaaaaatatttgatttaagcacttattttttttgccaattataattagagttcctttaatagacattgcacacataacacatatataaccacacagacaaccagaagaagattcagtagttacaatattttttttctcctaatttcccaattggcttattggcctttgggtggtgccctttaagaacagggctaggaaaacagtttccagggcctaataaacaagtagagctggaagacaaagattttgagaggtacttattcacctttaattccaggggttccataaggaaaacagatttttcccaaaatgggatttgtggtgccttttctgttttcccaagggatcccaggccaccagaaaccgttttaggattttatacatgcaccaagagtggcaagacagagtggaaaaaagtaattcagttaactgggaaaaaaccttttccaggaaaacaagatctatgaagagaagccttttgaatatactcatagcttggaggagggaaagacctggagagggttttcattaggaagaaagatattttttttttttttgagactttgtcttgctctgtcacccaggctggagtgtagtggcgtgatctctgctcactgcaagctctgcctcccaggttcacgccattcttctgcctcagcctcccaagtactgggactacaggtgcccgccagcacacccggctaattttttgtatttttagtagagatggagtttcaccgtgttagccaggatggtctcgatctcctgacatcgtgatcagcccgcctcagcctcccaaagtgctgggattatagacgtgagccaccacgctcagccaggaagaaagatttaggaagaaagattttatgagaggtgcaaacttgacacagggagcgttgggatttaaagtagaagcagaaagcctgaatatagagaacctcttgccatttgctgttcttggttataaagttgttaaggttcctgagaatttgcaagctaaaggtgccatttttgggccatcagctgtcattatctaatgtgtattggggccaggccatgttacaataaaagactacatgcttaagccaagtttggcgaggttgtgaaggagacagcacagtggagagggtgtgggaatgtgggattgtttggcacccatgtggactggcaagaagaagccgagggtgtctgtttttgttctaggcgtccccagacaaaagacagagacctggagttctctttctaaagaggatggtcaagctgagaagaaactgggcatccccaagatttcctctagcttagtcccactggtcctctgaggaccgagatggcagacctgactttttccagataccatgagaaagccaggggagggcagatcttaccagtcagctggattagtgtctgatgttaacgttccagttggcctcttgggctgcagctgcacaagggagagagagaaaagggaggattagagaaaagtgaactgaataaaaagacaacgagtggtggccagagacctccaggatccaggaattaactcaggacaagctgctgttgcccactgcttcctgggttgcaggagagcctctgcccccagcacccatcctgggtttcggcaccaaatgtaagagttagaggaaagaaacacgaaatgcagcttgacagtcaaagacaggtttattttagaaaaaacctgagaggggcttctggctgatttctgtcagaagtgctttctcttacagactaagagtgtatattggttttagggtgagggggcttattacaagcttggaatgtttctgtgtaggggagaagtttatgggggcgttggaatgtctctgggcagaggtggattatcttggggctagcatgtctctggtctgggaggagttggaatgtttctggttggagatgttatttgtggtttatgatcatgctgacttagccattaggctgatgccctttggatttaggcagtttttgattaaggtgacttttaaaatgaggtgcttgtccacgatggtgatgcttctactcggtcacccagcctctagtcaaaggcttttttccaggaagggcagaacttcagcttttctcatcttacctccacctacccattactgaggttatgtcctgtgtgggtatgtttgaaaagtggggacatggtttgtgagtatggtgcactcagactactaggacactgatcaactttgcctcagctcgtagaggtggtggatccatgccaggacacaggccaagaggacatcaggctgctgtccctccccgccactgaacactcagttcctaaagagagaggattactcagaaagcagcttgccaacgctcctacccaagcttcagagccctgtcagattttgccttgaggtggaagagaagcaagctgtgaaacacatagctcctaacctcttgcctaagaattaacttcaattgcaacagatcatgagacatttaagtcaaagggcactccatccttgatgcagtggaaatggggaaatggaggtgaaagacaattcacaggagatttgtggatttaatgaagatactgcctgcactgtaggccagctaatttgtggacaaaaccaggaaaaaaacactgttaggaggagtccattaagcatctaaacaaacaactattaaacgctgatctcagatagtattgttagaaaggagagaaaacatatttggatttacagggcaaatttgtccctggacttttttgagaacaatagagctatctgaaggggtgggttgcccctccacacctgtgggtgtttctcgttaggtggaacaagagacttggaaaagaaaaagacacaaagtatagagaaagaaatagggagacccagggaaccagagttcagcatatggaggatcccgccagcctctgagttcccttagtatttattgatcatttgtgggtgtttctccaagagggggatgtgtcagcgtcacaagacaatagtggggagagggtcagcagacaaatacgtgaacaaaggtctttgcatcatagtaaagaatcaagtgctgtgcttttagatatgcatacacataaacatctcaatgctttacaaagcagtattgctgcccgcatgtcccacctccagccttaaggcggtttttccctatctcagtagctagaacgtacaatcgggttttataccgagacattccattgcccagggacaggcaggagacagatgccttcctcttgtctcaactgcaagaggcatgccttcctcttttactaatcctcctcagcacagaccctttacgggtgtcgggctgggggacagtcaggtctttcccttcccacgaggccatatttcagactatcacatggggagaaaccttggacaatacctggctttcctaggcagaggtccctgcggccttccgcagtgtttgtgtccctgggtacttgagattagggagtggtgatgactcttaacgagcatgctgccttcaagcatctgtttaacaaagcacatcttgcaccccccttaatccatttaaccctgagttgacacagcacatgttccagagagcagggggttgggactaacgttatagattaacagaatctcaaggcagaagaatttttcttagtacagaacaaaatggagtctcctatgtctacttctttctacacagacacagcaacaatctgatctctcttgcttttccccacaccatcagccagcaatcagtgcagtttaacatctgagggctgtccaagagaggaagagattcccacagtaccattgtcatgccaggatgactgcaggcagaaacaaagctgagccacttcccctcccctcaagagcaatatcagagacttaaagttatgaagaagaaattgacagagcaagagcatcgccatcgtggacaagcacctcattttaaaattcaccttaatcaaaaactctaaatccaaagggcatcagcctaatggctaaggtcagcatgaccataaaccacaaataatatctctgaccaaaaacattccagactcctccctgaccagagacatgcaccaagataaccctcactctggctgggaagatgccagccctgagaaacccccctccggccagaaagatgtctgccccaaaataacctcccctctgcccagagacattccaagcttgtaataagccccctcaccctaaaaccaatatatactcttagtctgtaagaaaaagtgctcctgaccaaaataggccagaagcccttcagattgtttctaaaataaacctgtctttaaccatcaagctgtgtttctttcctctttaactcttacagaaatagacttcaccaaaatagtccaatcggtctctaaacaaaacaaagcaaataacaataacaaggcccggagaaattgaacatacttgagaaggttcagtatgttatcaaaaatgtccaatttgcaacaagtacaacccatacatcaaaaaaaaaaaaaaaaaaaaaacctgacaatagaaactgcctgtgagaacagatagcaaatttaatcgaaaaatacttcaaagtgtacattataaatatgttcacagaaccaaagaagagcatgacttaaacacattgaaatttggaatctagctgaaggtttctccacaccaactaccctactttcacaatctttctaatgtaatgactactgtaaaaaatgacaagcctggctgggcgcagtggctcacacctgtaatcccagcactttgggagaccgaggcaggtggatcatgaggtcaggagttcgagaccagcctgaccaacatgataaaaccctgtctctactaaaaatacaaaaattagccgggcatggtggcgggcacctgtaatcccagctacgcaggaggttgaggcaggagaatcgcttgaacccaagaggcggaggttgcagtgagctgagatcgcgctgctgcactccagcctgggggacagagtgagactctgtcttaaaaaaaaaaaaaaaaatgacaagcccattattagtggttcattaataggttttgaacgtacattgctaccagtatcacagaaagtgcaggttttctgccatgtatgaattgtttgaaagtaaatgcactgattactctgcaacaaggctcccccatagctattataaaaataataacatccatgtatgaagtttcttagttctgtttccctgtgaagtatgttataaatacttcaacatctatgttacagtaagtatattatttgtgttgaaaattttgttttaaaaattgataacatgcaaagatcccctcaagggattttcctcttgtgagggcaaatcaccttagatttctcccaggctttttctattgatctttaatgttctggttgtgccatttgtttcctaaaatgtagaccgagaaaaatcattatcatttagaaagcatggaaaaattactggattgtaggttcattgtgcactgcagccatgcttgatcaattcatcaaaatacctcctttccacattccaaattttggaacagcactgatggccaaaaagcacttgttctctaattgactaaaggaaaaaaatagtatcctcacctatagaagccaggtgctgatggcttccctcatcacatctctacagattcttcacggaaaaatccagcaaagcctactccttctggatgaagttcagagtcacatcttcaaagaccaccaagccgtgacatatcccagatatgtgtagaggaggacaggtgagacggacagcactggggatctagactcaattcatgagagttcacactgaagcggtgtcattgtctcggagccatggaaaactaggacatggacaaacagaggttctgagcagaagtttaataggcgaaagaaagacatgagctctctctgctgcagagagaagggtctcagagaagtgggttgctgttcccacagtgaaatgcagttttatagatgagcttgaggaggcagtgtctgatttacacagggtacaaaagattggttggggccgggcgtggtggctcatgcctgtaatcccaacactttggggggcagaggcgggcggatcacaaggtcaggagacatcctggctaacagggtgaaaccccatctctactaaaaatacaaaaaattagccgggcgtggtagcaggcgcctgtagtcccagctactcgggaggctgaggcaggagaatggcgtgaacctgggaggcggagcttgcagtgagccgagatcgcgccactgcagtccgacctgggcgaaagagcgagactccgtctcgtctcgaaaaaaacaaaacaaaacaaaaaaaccgacaccagttcactacaatctttctataaaatacaagagtaaacacttcctaatacatgctaggaggccaacagaatcctactgccaaaactagatagatacattacaaaggtggaaaactatagaccagtaactctcatgatcatagatcctaaaagttctcaacaaatattcacaaattgaatctaaaaatgtataaaaagaattatacaccacagtcaagtgggaatcattacaggtgtacaaggctgattcaaaattcagaaattgccaggtgcggtggctcatgcctgtaatcccagcactttgagaggctgaaaagattgcttgagcccagcaggcagaggttgtcctctgggagtgaaccagaggctgatattcactagatcctccaagatacctggcaactgtgagtatcctgggtcaaccccaggaagttctaaaacccaggaacagggacagatcaccctataaaatttccaaaagggaacctcaatccaaagacattctggtaaggtgtctgtgcctagggaagataaaaggaggagaggcacaaaagagtaagtgcacccgagtttcatgcacttactctgttttcctcatgtgaaatgttcacaaacagaaaaatattttaaaaagagctatcgctctgtgaaaaaaatgataaagtactgcatctgtttgaaatgtacaataaaggacaaatagttgataatattttgaatcgatgaagcaaagttggcacttgggaatgtggggaaggaattggaaatttaggaattcatacaaaccctagaagggttaagttcggcaaacagaattgtggatttgagacctgcgtcccacacttttggaaaatgcaagggcaaacaaatacacgagaaaatcggtacccctggggagtgttaaaagaaataagaggcaatcagactggaatggctatagtgccctgagttgcttcccaaggacaccaaaatcggacacaaatgtagcttgtaaattaccaatttagaggaaaatgaagtttagcctccgactacataaccagaacatttccacctggatagacctgtcagaaataggaagaactgaaagaaatttgttaaaaagtggcctaagatggctgcaggttggacatacaggtaatagaaaccaggcccatgaaataaaactgaactctcagcctgcaagttaaatatttcactgacctgtactgatgacaaccttgcctatcagatgaagcgaaggtaggacagattcaatcatccctgtctaaaccctgcgatgcctgtgtactggttaacctttcatatactttcaccacatacttgctttatcttataaggtcactgcccacctctcccattttctgtgtaacacaaggtataacacttcacgtagcccactccaggacacattgtttgtgctgggtctgcattcccaggctattgtccttaaacttgacttagaataaaacgcctgtttttttaacctttggttgacagaccaaataaggcgacttataaccaaagatttaacttggcttgcttcctcatacaccttataaaagcctttccttcaagcccccctgacgggaccccaaagaacaagccatggttgggttattcatgaattgctcttggctaaatagttaaatatttaacggtgctgcattttaatttttacaggtgaaaggcaggattgggaaccccacagaccgcagctcctcccaggagaaccccacacatgagtctggatcctcgccatgatcctcccgtggcccccacacaatctggggagacgcggggccgcgggcactgcgctgccgagagggctccggactgaggctgcagttgctgcgcagggacggctcaggatgcccggggtcccggctgctggcccagccccaccctgtggccgaggggacccagggacgagctgcgccagggagactcgggtccgcagaccccggaatcgctgctgacaggcccgggtcccaccacagcaggtcccaaccagcccctcctcccacccggccttgcacactcaccatttcccggctcccaggtgtcccgggtcctcccttggctccggagatcagtgctggtcaccaccggacagaagctgtggtggagccacctcggcctctggaaggctgaattcagtgggttaggggaacaggagccccttagacttgcggagcttggccccaccctcctggcggagcgcctgattggataatttacacgaccccgcccagtacccctaggataggaatcaagccccaccccctaggcccgggtttcaggagaagccacggaaaactcggaagtgtggagcaggattgacaggttctagcaacagccctcccacccccccgcccaggccaggcttccttctggagcttggacgtgaccccacactggggacatttgcatttaagaaaaacttggctccaggctttccacagtgggccctggcatcttcctatactcactgggccctttctgtttcttccttctggacgggggttcacaagtgtgagcaggcagttccacactccgtgtccaattgagccagtacctttgctggaagctactgggctggaacaggagggagagcccagatgtcttccagggatcaggaatttgggataagcggctggtggcatggccaaggcttcctcataccttatctcagtctacccattttcagggaagaaaatgaaatatgccaacaagggaacaaaaattaagtgcatggaaaaaagttatactacagcaatattctgtaaagaaatcaaaaggggccgggcgcgatggctcaccctataatcccagcactttgggaggccaaggtaggaggatcacctgaggtcaggagtttgagaccgctctggccaacatggtgaaaccccattctctactaaaaatacaaaaactaggccaggcgcggtagctcacgcctgtaatcctagcactttgggaggccaaggcgggcggaccacaaggtcaagagatcaagactatcctggccaacatggtgaaaccctgtctctactaaaaataccaaaaaaatcagctgggcgtggtggcacgtgcctgtagtcagagcagctcgggaggttgaggcagtagaattgcctgaacccgggagacagaggttgcagtgagccaagatcacaccactgcactccagcctggcaacagagagagactgtctcaaaaaaaaaaaaaaaaaaaaaaatagctgggcatggtggcacgtgcctgtaatcccagctactcaggaggtcgaggcaggacaatcacttgaactcgggaggcggaggttgcagtgagccgagatcgtgccactgcactccagcctgggcagcagagtaagacttcatttcaaaaaatgggaagaacagcaaacattttaactagctcagataagcatcctccttcacaaggaaaagccgcattcagaaaatgaatcacgttcccaaccttaagagccaggttctgactgctgtaacgcagccccagaggggatcagtctgtgagttcctgtcccctcagtgtggaaatgctccctccttcaggaccttaattttcaccagcaggaaactctcacctggaatcagcttaaggttctgatctaaataaactgtcaaaatcataaacccattctccagaagacaacccaaacaagtctttctctaaacctgaactaaacagatttttttagagggagtctagctctgttgcccaggctggagtgcagtggcgtgatctcggctcactgcagcccccacctcccgggttcaagcagttctcctgcctcagcctccccgagcagctgtgactataggtgcacaccaccatgcccagctaatttttgtatttttagtatagacggggtttcaccatgttgaccaggctcgtcttgaactcctgacctcaggtggtctgcctgccttggcctcccaaagtgctgggattacgggagtgagcgactgcacctggcctttttttttttttttttttttaaacaagatgggggtctcactatgttgctgaggctggtctcgaagtcctgccctcaagtgatcctcctgcctcagcctcccaaaatgctgggcttataggtgtgagccaccgagcaagcccagcccaagttgcatttttttttttttttttttttttttgagatagagtctaactctgtcatccaggctggagtgcagtggcgtggtgtcactcactgcaacctccacctccctgttcaagcgattctcctgcctcagcctcctgagtagctgagactacaggcgcatgccaccacacgcagctaatttttgtatttttagtagagatggggtttcactatgttggccaagctggtcttggaactcctgacctcgtgctccacccgccttggcttcccaaagtgctgggattacaggtgtgagctaccgtgcccagccccaagttgcgtttttatatagtaacaataaacggtctgaaagaaaattaatgaaacaattccatttacaaaagcaccaaaaacagtaaaaattcagccaagaggcctgtatcttgtacactgaacactacaaaagattgctgaaacaaattaaagaacagacaaataaatcgcaagtaatcccatgttcatggattgtaagacttcctattgttaggatgagcatactacccaaattaatctacagatacaatgcaacccctatcaaaatccttatggccttctttttaggccgggcacaatggctcacacctgtaatcccagcactttgggaggctgaggcaggcagatcacttgaggtcaagagttcaagaccagcatggccaacacggtgaaaccccgtctctactaaaaatacaaaaaattagccgggtgtggtggctcgtgcctgtaattccagctactcaggaggctgaggcaggagaattacttgaacccaggagatggagggtgcagtgcactgagattgtgccactacactccagcctgggagacagagtgagattctatctcaaaaaaaaaaaaaaaaaaactagaaaaaatcaaccctaacgttcatttggaatctcccctaataccaaaacaatcttgaaaaaaagttcaaagactcacgcttcctgatttcaaactggctataaaactaccatcatcgaaaccacatggtactgtgtagggacagacatacagaacacagatcctagaaagaaaatgcttgcatatgtggtcaaatgattttttgacaacagtgccatgatcattcaatggagaaaggatggtctttaaacatatgttgttgggaaaactgggtatctacattctaaagaataaagttggacccttaccttatatacaaaaattaattttgagtcaaagatctaaacttaaaagccaaaaccatagaagacttagaagaagatataggagaaattttcatgacattggatttaacaatcatttcttggatatgaaatctaaagcacaggcaaacaaaagataaactgaactacatgaaaatttaaaacttttgtgcaccaaaagacaacatacagaatgagaacatatttgcaaatcacgtatcttggaagagattaatacccaaaatacataggaactcctacaactcaacaaaacaaaccaatgagcccattcaaaaatgagtgagggacttgaaaacatttgtacaaagatatataaatggccaacaaccacatggaataatgctcattaccactggtgattagggaaatgtaaatcaaaacaccagtgacagttcacaactgttggaatggctgccatttaaaacaaaaagtagaatataaccagggttggtgagcatgcatagaaactgcagtccttgtgtattgctggggagaattttacacacagccactgtgaaaaacagtatggctatacatgaacatagaaaaccctgtgacccagcaattccactcctaggtatgtatctaaaagaatagaggccaggcacggtggctcacacttgtaatcccagtactctgggaggccaaagtgggtggatcaccagaggtcaggagtccaagaccagccttcctggccaacatggtgaaaccctgtctctactaaaaatacaaaaagttagctgggcatagtggcagacacctgtaatcacagccactcaggaggctgagacaggagaaacacttgaacctgggaggtggaggtttcagtgagccaagatcgcaccactgcactccagcctgggcaacagagcgagactccgttgcaatcaatcaaccatggaaagcagggactcagacacatacgcactgattttagagcagtattcagagtagtcaaaagagttttgtggaaacaacccaagtgctcaacatatggatggataaacaaagtgtggtgtatccaatataccacacttgggaatattattcaggcacaaaaactgaattactggtacatgctaacatgtggatgaaccttgaaaacattatgctaagtgaaataagccagacacataaggacaaatactgcatgcttctacttacatgacgcacctagaatcagcaaattcatagagcaagaaaggaaaatagagattaccaagggatggggatgggaggaatagggaatggttgtttaatgggtaccaatttttttttggactaatgaaaaaattctggaactagctagctagctgtgatggttctaaagcactgttaatgtatttaatgctactgaatggcatacttacaatggtaaattctatgttactatatttgaccttaaaaaaaattaaaggccgggtgcggtggctcacgcctgtaatcccagcactttgggaggccgaggtgggcagatcacatgaggtcaggagttcaaggaccatcctggctaacacagtgaaaccctgtctctactaaaaatacaaaaaattagccgggcgtggtggtgggcacctgtagtcctagctactcgggaggctgaggcaggagaatagcgtgaacctgggaggcggagcttgcagtgagccgagattgcactactgcactccagcctgggtgacagagcgagactccggctcaaaaaaaaaaaaaaattaaaaactggccaggcacattggcacacggctcacacctgtaatcccagcacttcgagaggccaaggcaggaagatcccttgagcccaggaaacctgtctgggcaatatagtaagacctatatagtaagaccttgtctctccaaaaaaaaaaaaaaaaaaaaatatgatttaaaaaattacctgggcatggtagtgtgcacctgtagtcccagctattcaggaggctgaggtgggaggatcatttgcttgggaggcagcagtttcagtgagccaagagaacactactgaactccagcctgggtgacagggagaccctgtctgaaagaaaaaaaattaaaaactaaagacacaatttgagctactagaaaggaaaacaacaatgcctggtataaaatatgcactggattgaataaccagatcagatatttcaggaagaaattaagacccagcaatagaaatgacataattttaaatacatgcacttaacaaattgccaaaatacgtcatgcaagaacacacagaactgcaaggtgacacagaaaaattcacagttaactgaagacttcaacacttctcagtaatacaaagatccaacaggcgtagattcagtaaacattccttttttattttaaaatacttcacaaagattgtatatgttcatgatgtacagttatgttttgatgtatatatatacattctgtaatggttaccacagtcaaattaacacattgatgaccacccatgctgtacattaaatctccagaacgtgttcaccttacaacttggtttttaacctttgaccaacatttctccattttccctaccttctggactctagtaaccaccgttcctccctctgcctcggagtttaagtttttaatattccacaattaagtgggatcatgaagtatttgcctatgtctgccttattttatagtgtccaccaggtttattcatgtgacaaatgtcaggatttcctttttacggctgagtaatattctgtttaaatatacatcacactttctttattcatccattaatggatgctaagtttgtttccatatgttgactattgtgaataatgctgtaatgaacatatgcgagtggcagatatctctttgaaatactgatcactgcctttggtcatatatgcatatacccaggagtgagactgttggatcacatggtagtttttgtttttttttgcagaacctccatattgtttttcacaatggctgtaccaatgtacattcccaccaacagtatacaaagcttcctttttctctgtactctaacactaatctctcttgatagtacccatccttgcatgtatgaggtaacatgtaattgtggttttgatttgaatttctctaatgattagtgatattaagtcccttttcatttgctttccggccatttgtatgtcttctttgaaaaaaatgtccactcagggtttttaaatttattttttcttattgtttttaccccttgcagaaaccagtctatttttcttaatttgttagttttttgagatgagaggggtctcattatgttacccaggttggtgtcgaactcctggattcaaacgatcttcctgactcacacttctgagtactgggactacaattgggcaccactatgcccagctaataatttatttatttatttattttagacatgaagtctccctatgtcgcccaggttggtcccagattcctagcctcaggcactcctcccaagtacgtggaattataggcataagccacggcacctggcctcctaaacttatgagtgttccaacttgtaatagactttgaaacatatacaacttgttggtgcgtcccaggccaatcctcacatttggctttgattagcctttatcaaattattctgcctcaacagacttaattttggtcaacaatttaactgaggtactttatagataacagtgtccattataccacaggaaatacttcagtgtttaaataatgagaaaagcaaaagctgttcccaatgacagctgctccccaactcaccacaaggcgaagtcttaccctgttgaaaactgtaacaaacctccatcagacaaagctaccaggtgaccataatggatcaaaatgaaattctgtaaccatgtctccgataacctaaaagaaaacagactccaaactttaaaaatgaccagaaatctcctaatatgacttgtgcttcttatgaattagtgttagtgccactctattctttctgcctcctagataagaactattagaattttccaaggatggaattgagttcacctaacagcatccaatacaaacacctcactttgttgaatggcaatgaaatcacctaaaagaaacacaaatcctataagaagtcctcttgagcaccctcttatggataaccctccgtcattgatgctttgtgttcatccttattacaactctttacatgccactctttgactataggtgtgattctagtggtctctggcaagatggcacagacaaaagcatgctttgttcctgtggtattctaaatgagaaattagattcatgagaaaaattgtgaccatgtaagaattttaaaaaattttttcctttacattttctttaacattttttaaagaaaaaaagtacttggacttatatgcaaatggtaatactgactcattatttagaatgtataatgaataacctgacaaaattacaaagttgacctgaaaatgcataattgcaatgggatattttaatatatattctcaggtaatggaaaatattaatacaatagttgttagtatacaagttgttttaaaagagttaataaaatatttctaagaaatacctgcagaagttgtttgataaaaatgcattgtttttatcatgtacaaacataattgagaatgtgcacatgatcacatttggctataattggaaattctcacgatctgcctgacctaagacatttgttttcacatagactgtgtcagagcagttactgcacaatgcaacagaggaacaagcccccatgttgttctatgtgactgtatcactgtagctgtcacagggaaatcaggaacacagttattaccagtattaacagaatgaagtgtttactatgcaaattagatcttgtttgaatataatctagagatgaggggagtcagaacaacagaaaatatcctcaaccatgacagttttaattagttgcctggtggattatgttgatgtgggtaatgttgttaactaaattttctagaatcttttttttttccatgttagaattcaccaatagcctaatgacatgaaagctgggaggcagaacttaagaaggctgcaaggggactgcgtggacaccggcctcctgcctgttttcctgatactttgtcctgacaatcaagagtttctttaaaacaccactgtctacttctgttttctcagacaggtagagttccacagatgtctccaccatcttcacatcaaagatataatttgcagtttggattttcctgcaagccctcatttgtccctatgcatctgtctgtctccacgcagatgggtccaaaacctgactaatgccttcttcagttctgccttccaactttcatgtcaggctactgctgaattccagcatggaatccaaaagggaatagattctagaaaatttagttcacgttacccataatcacatagcacaatctaagaggcacacctccaacctagattgtgttgtcctatcacagatcttacttcttaattcaaagtctatcatccatatcttggccagaaagaaaaagagcaaaatatggaaataatgtatataagactatattgtataaccttggcccactattcattagcaagggaaataaaataaggctcttctaaccaaaaagaagaaaggttttctcctgaggaaggtggaatatatatataatggataagggaaagccaatacctgccacaggatgccagtagaaaactcccagtaccaaactgtcatttttcaatggcccagaactattaaaacattttattaactgacttaaggaattttatttaaaaattttattaactgacttaaggaaaaaacactaccaattatacttctgcactatttcttaaagagtatttacagaataatctcacctcaatgttcatttatgaaaataagtaggaacccagagtgcagagatccactttaagaatgtggcactaagccaggcaacgcagcacacatctgtagtcccagctgctcaggaagctgaggtgggaggatctcatgagcctagaagtccgcggccagcctgggcaacatggcaagacccatctcaaaaaaaaaaataaaacaaaaaaactggcccagtgtggtggctcatacctataatcccagcactttgctgggctgaggtgggaggattacttgaggtcaggggagttggcgaccagcctgggcaagataatgttgcctgtctctacaaatatatacgtatatatatacatatataaaaatattttaaaataaaaatatattaaaaactaggaagaatcaaaaagggatgtggcactgataaatacatttataatattttttcatggcatgaattttctagagcattctacctgaattaagttatatcaggctttcctgtattacttacattcatgcaactaccctccagtatgaactttcatatcaactttgaaaatcgttaaaattgaaaaactttcgatatttacatttatagtttctattcagcgtgcactttcttcacatggtattgtaaggatgcacgccaaatgaaggcgttgccacaatccttacatttataaggtttctctccagtgtgcattctcatgtgcactcgaaagcctgtaaggaaactgaagggttttccacattctttacattcatagggtttctctccagtatgaattcgttcatgtatatgaatataactggaactactgaaggctttaccacactgtttacattcataaggtttctctccagtgtgggttctttcatgtatctggaaacctgcaagagtaatgtatgttttcccacattttttacattcatactgtttctttgcagtgtgcatcctttcatgtcttcgggcagaactgcaacaataaaaggctttcccacattccttacatttgtagggtttctctccagtatgagtcctttcatgtctttgagctgagtagtagtatctaaatgcttttccacattttttacactcaaagggtttatctccagtgtgagtactttcatgtgcttgaaaacctaaaggagacaagtaagttttcccacacagtttacattcatagtgtttctgtgcagtgtgattcctctcatgtttttgagcagtacagtggtaactgaaggctttcccacattccttgcatttgtagggtttctctccagtatgagtcttttcatgtctttgagcagagttgtgatatacgaacactttcccacattttttacattcatagggtttttctccagtgtgagttctttcatgtgcttgaaaacctacagaagatatgtaggtttttccacattgtttacattcatagcgtttctgtacagtgtgattcctttcatgtgctcgagcagaatggcggtaaatgaagggtttcccacattccttacatttgtagggtttctctccagtatgagccttttcatgtttttgagcagattggtggtatcggaatgcttttccacattctttacacttaaagggtttatctccagtgtgagtccttccatgtatttggaaagaacgttgacaactgaaggctttcccacaggccttacatttgtagactatccctgcactgtgtgttcttttatgttttttaaaagactgcagataactgaagggtttcccacatttcttacatttatatggcttctctccatattcctgacacttatacagtttgtgtctggtgtaagatctaatgtgcctgttaagggatgaatgatggctcaagacttttccacatacactgctttcccaaagctttcctccagaaggagttttcttgttcagactgagatttgcaatctggctgaaaccttctccgccatgactaccttctttactttcacagagtctctctaccatatgatttctgtaaaaaatgagtagcacattaatagttcattttttaaagattttctctttattaactgatactagaataactattttttccactttcagggaaagtacagatttttttgtcctgtctaaattgcttgtgaggtgaatgtactgaatgctatggccctgcaagagggctcaaacataactgttatgaaaacagtgattttcatatatgggtttctctttttttttttttttgagacggagtctcactctgtcacccaggctacactctgtcgcccaggctggagtgcagtggtgcgatcttggctcactgcaacctctgccacccgggttcaactgattctcctgcctcagcctcctgagtagcagggattacaggcacctgccattgcgcccggctactttttcactatgttgccgaggctggtcttgaactcctgacctcacaatccacccacctcggcttcccaaagtgctgggattataggcgggagccaccgcgcctggaccatgaacatctatgccatatttaagaaagcactttggggccaggcgtggtggctcacacctgtaatcccagcactttgggaggccgaggcgggcggatcacaaggtcaggagatcgagaccatcctggctaaacacagtgaaaccccgtctctactaaaaatacaaaaaattagccgggcgtggtggtgggcgcctgtagtcccagctactcgggaggctgaggcaggagaatggtgtgaacccaagaggcagagcttgcagtgagccgagatcacgccactgcactccagcttgggcgacagagcaagactccgtctcagaaaaaaaaaaaaaaaaaagaaaagaaagcactttgggttatttttatttatttatttttcccgagatggagcttcactcttgttgcccaggctacagtgcaatggcacaatctcggcttactgcagcctccgcctcccgggttaaagcgattctcctgcctcagcctccgaagtagctgggattacaggcatgtgccaccatgcccggctaattttgtatttttagtagagatggggtttctccatgttggtcaggctggtcttgaactcccgacctcaggtgatccggctgcctcagcttcccaaagtgctgggattacaggcatgagccactgcgctagctgggttaatattttctaagaacagatacatttgaggctcagcttgttttgtttctttaattatcaaatttaatgacatactaagatttttctcctagaatactgctttcttttctgagtgtgactcacctgagatttctcccctggtttttgtactgctcttcaatgttccattctttttgttttgttcctgaaatgcagacccagaaaaaattatcataaattattagaaattacagaaaaattattagattctaggtccatatgtgaccatgcctgatttacaaaagaattttgccttttcacattccacatcttggaatagcattgatatccaagaaaaaggtattctctaattcattcaacaacatgatggaatgatttcatttttacctatagtggccaggttcctgaaggtttcccacatcacgtctctgtagagttttttctgtgaaggatccagcaaagtccattcctcctgggtgaagttcacagccacatcttcaaaggtcactgagtcctaaaacattccaaatgtgtgtaaaggagaatgggtgagactgacagcactggacatctatactcgagtcataagatgttcacgatgattctgtgatctccagagatttattctatgaatttgttgtcagaactctaactctttggccacactccctcagtagtttatgaacacacgaaaattatttctacactttcactgtgatcacaatcatattgctttccaatggcaggatccagagcactctggaaaagtgagagaaatgctgtacaaaaaaattccattttaagaccatcaattctttgtgagaaaaactcatcttcttcttatacatcacatcactcaacattccatgagacacagggtcaaacatggataatacgtggatgaataaaagcacactgaagaactagaagctttttctactattcccatcactaagcatgagaacaagaggcacgtggaaatcaaacttgtaacaatatttacctgaccatattgtcctgaggtactctaggatattcgaggtagtcagatccagccaattcaatcaaaatatttcttttggagaagttggctgggcacaatggctcacacgtgtaatcctagcactttgggaggccgaggcgggcagattatctgagctcaagagttcgagaccagcctgggcaacatggtgaaaccctgtcttggtggctcacacctgtaatcccagcactttgggagaccgaggagggtggatcacctgaggtcgggggttccagaccagcctggctaaaatggtgaaaccccatctctactaaaaatacaaaattagctgggtgtggtggtgcatgcctataattccagctacttaggaggctgaggcaggagaatcacttgaatctgggaggtggagggtacagtgagccaagatcgcacattgcactccagcctgggcaacggagcgagactctgtctcaaaaaaaaaaaaaaattagctgggtgtagtggtgcgcatctctaatcccagctactcagggggctgaggcacgagaatagcttgagcctgggaggcagaggttgcagtgagctgagatagcaccacttctctccaccccagagaagtgttcattttcactatttgtgttaatatttatcagagacttatttctttctgtcccatttcatggagctattaagttactgggaagttagagctcaggcatgaggaataaagcatgacaactttagataaaatctctacacttctgagcctcagggatacttcctaccaatttttagcaaatatttgccatcctgagatggtaaaatgccaaaagagctctttccagcagaaccattccagttaaccttgggacttgctgaccttgaggaacaggttaagatttgcagtttacaggccaggcgcgttggctcacgcctgtaatcccagcactttggggggccgaggcaggcagatcacctgaggtcgggagtttgagaccagcctgaccaacatggagaaaccctgtctctactaataatacaaaattagctgggtgtggtagcacatgcctgtaatcccagctactagggaggctgaggcaggataattgcttgaacctgggagacagaggttgccgtgagcctagatcgcaccattgcactccagcctgggcaataagagtgaaactccatctcaaaaaaaaaaaaaaacagatttgcaatttacaataaagtgcattaaagtccacaatgatatgatgaattttcacatgattataaaatgtataaaaggttctcagcagaggtttcctccaaaagaacataaaatgccctttctccaatttaagaaggaagtgattccccagccactctagagaagagggataagagttgaattgaacttcttttcagaaaccatacgagaaagtagagtgaaatatttaaagttctgaaagaaaaaatctgtatcaagcaaaattatccttcaaatgagtccgtagtactttctgagacaaaaattgagggaatctgtcaccagtacacctgctttgcaagaaatgttaaattcaccagaaagaaagtaaataacaaagaaaggtactgcaatagaaaaggcataagtggaagcaaaatataatcattttctcatccttgattaatgtgacagataacaggttgttcaaagtaataatagctacaacatataagtacagtttatggataagtgaaatgagtaacagcattgttatgagggaggaattgggaatactctattatgagttacttgggcaaccagtgaagtggcctaagattgctagaaagagggcttgggatagctgtatactgaaaactcaagggcaaccattaaaatagtgtaaaaaaaaaaagtataatcaatatgttaagagagggaaaaaatgaaatcaggtaaggtaaagagtcaaacactgaagtcacaaagaaaattaaaaagtatgtaatctacaagtaaactacctaattatatgttgcctacaagaaactttttttttttttttttttttttttgagagacagagtctcactctgtctcccaggctagaatgcactggcacaatcttggctcactgcaacctccgcctccagggtttaagcgattctcctgcctcagcttcccaagtagctgggactatgggcgtgtgccaccacacccagctaattttttattttttagtagagacagggttttggtttacgttggccagctagtctcgaactcctgaccttaggtgatgtgcccgcctcagccgcccgaagtgctgggattacaggcgtaagccactgcacctggcttttttttttttttttttttgagacagaattgtgctctgttgcccaggctggagtgcagaggtgtggtctcagctcactgcaaccttcgactcttgggttcaagtgattctcctgtctcagcctcctgagtagctgggattacaggcacatgccaccacacctggctaatttttgtatttttagtagagagagggttttgtcatgttggccaggctggtctcaaactcctgacttcaggtgatccacctgccttggcctcccaaagtgctggtattacaggcgtgagccactgtacccgcccaaggagttgattctctaagaagacgtagagaatctatgtataatctttagcgtacatgtgcataacaaaagaactgcaaaatgcacaaggcaaaatgtgataggactacaaggagagatacatgaatccatgactatggttgagatttcaacaccctcctaccagtaattaagagatccagtaggcagaaaaaaaaacaggaaggacaggccgagtacagtggctcacgcctataatcccagcactttggggatgctgaggtagggggatcgcttgaagccaggagtttgagaccagcatggccaactagcaaaacccatctctacttaaaatacaaaaattagccaggcgtggtggcaggtgcctgtaatcccagctactcgggaggctgatgcaggagaatcgcttgaacccgggaggcaggggttacagtgggcccagatcgcaccactgcactccagcctgggtgacacagcgagactctgtctcgaaaaaggaaaaaataagaaggacacaggtgaactgaatagcaccaaacaatagattccactgaaatacatggaatccttcatccaactacagcagtatacacatacttctcaagttcacatggaacagtcaccaagataagatagactacattgtgggacataaaacaaacctaatccagaagatcacagcagattaaaaaaaaaaaacactttaacaaacttgaaagaaaaattatataaaatatgcttgcagactacaatgacaatataaaaatcaataacaaaaaaacagttgaaaaacctcaaaatacttgcagattaaaccacacacctctaaacgacccacggatgaaagtagtagttttaagggcacttaaaaactagttttttcctttttaaagattttttccttttgtgttaaaaagcagccctcaaaatctcatagaactatttttacctaaatgaatgaaaggctgggcctggtggctcacacgtgcaatcccagcactttggaggccaaggtgggccgactgcctgaggtcaggagttcgagactactctggccaacctggtgaaaccctgtctctactaaaaatacaaaaaaatcagacaagaatggtggcatgcacctgtaatctcagctacttgggaggctgaggcgggggaattgcttgaaccagggaagtggaggttgcagtgagccgcaatcgcaccactgcactccagcctgggcgacagagcgagactccatctcaaaaataataataataataataaaataaaaaataaatgaatgaaaatacagcttattaaactttgtaggggctaggcgtggtggctcacgcctataatcccagcactttgggaggctgaggtggatggatcacttgaggtcaagagttcgagaccagcctggggcaacctggcaaaaccccatctttactaaaaatacaaaaaaattagccaggcatggtggcacatgcctgtaatcccagctacttgggaggctgaggcacgggaatcacttgaacctgggaggcagaggttgtggtgaaccaagatcgtgccactgcactccagcctgggtgacagagtgagactccgtctcaaaacacacacacacacacacacacacacacacacacacacacacccctttgtgggacacagcaaaagtatatacatagaggacaagtatgctactgaacatatacactagaaaggaagaaaaatatataatcaattatctaagcatgtgctttaggaaattagaaaaagcaaattaaaaccatagtaagcaaaagaaaagaaattttttcaaatagtgaaactgcaagaaataaaaaaaaaatcaaaaccaaaagccagctctttgaaaagatgaataaaattgattaaaaaatctagtcaagctaactgaggaaaacaaagaggacagaaattactaatatcacaaatgaaaaggaaaatgaaaatgagaaagcatttggctaagtacaacttccatttatgacagcaaactagcaatagagagaaactactgcttaagaaagaacatctacaagaaacttacagctaacatcatacttaatagtgaaaaacaagatgctttcccagtaagatgaagaacaaggcaagggagtcctctcacacagcatttctattcaacatgggactggcacatagtgtggggttgcatcagaagcctgtggacaacttatgaccatctggctacctgcagggccacaagaagggggtgctaaagcctacgtagtctggccgggcacggtggctcattcctgtaatgccagcacttcgggagtccaaggtgggcggatcacctgaggtcaggagttcaagaccaacctcaacatggagaaaccccgtctctactaaaaatacaaaattagccaggcgtggtgacacgtgcctgtaatcccagctactagggaggctgaggcaggagaattgcttgaacctggggaggcggaggttgcagtgagccgagatcacaccattgcactccagcctgggcaacaagagcgaaactctgtctcaaaaaaaaaaaaaaaaaaaaaaaaaaacagcctacatagtaaaggagtcagagggcattaattgcatggcaatttgaatagtctagaagcctctgtggtaaaaatacccattcaaggtgggccaacccgcaagtcacagcataactggatttaattaaaatttgcgcacaaggattatgttgcctccagcagaacaaagaacaaaagaatctgaaagatattatgatggtgagaaagtcaatagctatttcttagcctggccaacatggtgaaacctcatctctactaaaactacaaaaaaattagccaggcatggtggtgtatgcctgtaatcccagctactcaggaggctgaggcaggggaattgctggaacctgggaggcggagattgcagtgagccgagatccactgcactccagcctgggtgacagagagatcctgtctcaaaatacaaaaacaaaaacacgctatttcttcactatgtcagagaggatgcggtcctctgcttaccacataattttcaggaatttagccaaggtgtcagtgcctcttacattctagatggggcaatagcccttccactttttgtaagctcttttctttcaatatttgtatgtcttgaatgaatgtcaaatgactgtccccagagagcaattactctttttttttttttttttttttgagacggagtcttgctctgtcacccaggctggagtgcagtggtacaatcttggctcactgcaaccaacctctgcctcccaggttcaagtgattcttgtgcctcagcctcccaagtagctgggattacaggcgctcaccatcacaccgggcaaatttttgcattttttaaagtagggacaggtttttgccatgttggccaggctggtctcaaattcctgacctcgagtgatcttcccacctcagcctcccacaggtgtgggattacaggcatgagccactgctcctggccagcaatgactctaacataatgccatgcctgtgctcctgaagaaaggtagataaaatttagatcttgccagcaaagactgcaatatcaaggctactgaggttccctgaatagaaaccagataaaggtggaccacatcccttcaaaggtgaaggtaaactgcagctaagtctgttgaaatagagactgaacaaaacctatacaaatctgtgactacagaatatctaccacttgttcattggatggaatcagtaatctccataatgttggatattgggtgtaggggctcaataggttgggattacagcagtaaattgcaacagtccactttgaggcacccagatttaagaacaagccaaattaggctgggtgcggtggctcacacctataatcccagcactttgggaggttgaggagggtagatcacctgaggtcaggagttcgagaccagcctggccaacatggtgaaaccccgtctttacttaaaaaaatacaaaaattggccaggcgtggtggctcgtgcctgtaatcccagcattttgggaggccggggcaggtggatcacgaggtcaggagtttgagagcagcctggccaacatggtgaaactccgtctctactaaaaatataaaaattaaaaatataaaaattaaccgggcgtggtggcaggtgcctgtaatcccagctacctgggaggctgaggcaggagaatcatttgaaaccggatgatggaggctgcagtgagccgagatcgcgccactgcactccagccccggcaacagcaaaactctgtctcaaaaaaaaaaaaaaaaaaaaaattcaactgggcattgtggtgcacgcctgtaatcccagctactcgggaggccaaggcagaagaatcacttgaacccggctggtggagattacagtgagccaagattgcgccactgcactctagcctgggcgatagagcgaaactctatctcaaaacaaaaaaacaaaaacaaacaaaaaaaacaggccaggccaaattaggctgttaaaaggagaaatactcggccaagtgcagtggctcatgtccgtaatcccagcactttgggaggctgaggtaggaggactgcttgagcccaggagttcaagaccagcctggacaacatagtgagatctcatctctacaaaaaaaaaaaaaaaaaaaaaaaaattagctgagcatggtggcgcacctgtggtctcagcttctcaggaagctgatgcaggaggatgcttcagcccagatgttggaggctgcagtgagctgtgattgcatcactggattccagcgtgggcaacagagtgagatcttgtctcaaaaaaaaaaaaaaaaaaaaaaaaaaagcactggggataactgccccttcactacaaccatacaaccattaatggttttgtataatagctgtcaatccttcaaggcccatcaatttacattgagtcatattaactaatttaattggggagtaagtttcatggggtcccattttgtcaatctaatttgtaactgccaaatacctaatttgaatttatggccaggtgcagtggctcatgcctgtaattccagcacactgggaggccacagcaggtgaatcacttgcggccaggagtttgagaccagcctagccaacatggcaaaacctcgtctctacgaaaaacacaagaattagatgggcgtggtggcaagtgcctgcaatcccaactactcaggaggctgaggcaggaaaattgcttaaacctgagaggcggaggctgcagtgagctgagatcccgccatgcactccagcctaggtgacagagcgagactctgtctcaataaataaataaataaataactcactggttcagagcttccttggtcactgtgggattttttaagggctgttgtctcaccctgtcacccaggctggagtgcagtggcacagtcacagctcactgcagcctcaacctcccaggcgcaagctaccctcccacctcagcctcccaagcagccaggactacaggtgcgtgccactacacccggctaatttttgtattttttgtagacacagggtcccaccatgttgcccaggctcgtcttgaactcatgggctccagcaatccacctaccttggcctcccaaagtgctgggattacaggcatgagccaccgcacctggccctatgtgatattttaagacaatttgttctataatacaaccaagaatgacttagccaacacaatagttatgatggctaaggagaggcacagggatttctgctctatttattttatattcactaattcctctatgattatcaggataccttcattaaatttgatgggatacccaggtataactataacatgagccctagtattaatcccatgaaggtttatcaactgatacagatgttaaaattcagaacctacattatagaggccaaaaacccaaggagtgccctttttatgatttttgttatgcaaattcctttaatacatttccaactgggtcaaactgtggacttctgtttcatcagtgtttttttattttgttccttcccttccctgctttgttttttggttactggatgtactctgggggagggtgtgtcctctctaacctggtactaatattttttttccccaccagagagcctgtgtcatcagggtgtcatcactgtcatcagggtgaagcacctcccctacggcaatggttgctctagaaggtttaagaaccccaggtttaagtcaggtttgaactaacttctttgttatgccacaactatgccatgggtgttatcccccactaaacccaaaggtcaagctctctgttgtgggagaggcgcatgaagcagcagcaatagcactttagggtcttgggaaagcttctgctgttaaagagtgtggactcagtccatcatctaatggctgctgttccccaccttccctccctgtcctctttttgaaggactgctcttccaggggcagccacataatgaccaacctctgacagtgtatacagtcccccctccactcccactctttacatttggggcaacccaggcatcagtcacaacttcactataaatacacaggtctcaggccgccactgcgagaggagccgccaccatgtccgcgcatctgcaatggatggtcgtgcagaactgctccagtttctgatcaagaggactatgccgacctacagcaccaagcccagtaacttgaaggccccagctccttccgctacaacgggctgattcaccacaagactgtgggcgtggagccggcagccgaggacaaaggtgtggtggtggtcacgaagcagagatccggccagccgaagcctgccacctcctacgcgcggaccaccatcaacaagaatgctggcgtcacgctcagcagcatcagacacatgatcctcaagaacaagtaccgccccgacctgcgcatggcagccatccgcagggtcagcgccatcctgtgcagccagaagcctgtgatggtgaagcggaagcggacccgcgccaccaagagctcctgagccccctgcccccaaagcaataaagagtcagctggctttctcaccaccagcccctcatgcccgcaaaaaacaaaaacaaaaacaaaaaaacaaaacaaaaacacaggtaggtccttgcccaggatgtaaacccaggaccactttaaggaaggccctactcccatactccagctccccaattccaaggaattatcaaaaactgtcaactaaagtcagctgaacctagaaccagacttggtagggctcaacaatggaagaaacacagagcagcacagcacaaagcatgtgctcccagtaagcagcagctcaaactctaaatgggccatagagcaggtcagcaattcagaacaagagaagatagacccatgagtggtggtcaatatctagacatcttgttcacagcaccaactgctagtcacctagaagggcgaggctgcaatgatgacactgatgacagtgggtctcacacacactgagagggtatgaaaaggcttattactcccatgactgacgtctctagggagaacagggcaggcctctcaagcaggtgggaaatggcttaaaaaagcaaggaagggaacttgcccagggtgtttactgtggttggaagtggggctgggcgcaagttcctctgcatgggcagctggttatgtggtttgagtctcctgcccatgacagaggaaggatgcccaggccttctcagcttgtccagaagtagggcattaagggaagaggatgaagtggtcaattgtgaaacattaaaaatgtagagtccaaccactaattacaagaacaatgttgaacagggccaggcatagtggctctggtggctcacgcttgcaatcccaatgctttggaaggccaaagtggaggatcgcttgagcccaggagttcaagaccagcctgagcaacatagccagaccccatctctatataaaaaatgaagtagctgggtgtgctggcatgtgactgtagtcctagctactcaggaggctgagatgggagaatcacttgagctcagttcaaggttacagagagctatgattgcactactgcactccagcctggatgacagagcaagaccatgtcctctgtctctaacaataacaacaacaacaaaaaagacaatgtgttcaacaatagtgaataggaaaaatacgcatttacaattgcttgtttttatataaagaaacactaacagatgcacaagttattatcaaaactggttatctgggggtggctggagcaagagcactagggtaaaccaggatattctagcagtaagttttctcaacccacactttcttttagatttttttaaacctttgtgtgtattttaaatgattgaaaaaaattatataaaccatactttactattagccattatttttaattaacttgtttctaaaatttattgacttttaactttttttaaacataggaaaccattgtaagatttcatcctttaaataatgggtataaaagtgtaaattaagaaaaaaatctctaactaaatgacaaattgcatcatattttatctttctactgtatcccagagggcagtgctttcaggaatgagtagcctatttaaagcatgatggatttaaacctaactctaaatgtaaaaaagtctcaaagattacataagttttgagtagtttccatcgtatcattaaaataggaactcaattgaattttcatcttatcaattaaaataaaaattcatttttctttttcttttttctctttttttggtggagtctcactttgatgcccaggctggagtgcaatggtgtgacctcagctcactgcaacctccgtctcccaggttcaagcaattctcctgcctcagcctcccgagtagctgagattacaggcgcacaccaccacaccaggctaatttttgtatttttagtagagacagggtttcactgtgttagccaggatggttttgatctcctgacctcatgatctgcccgcctcgacctcccaaagtgttgggattacaggcctgagccactgcacccggcccaaaattcatttttcttaaagagtagagccttttaaatgtcacatcctctagggcatatgcacatacaaaactgacttaaaaatgaaaaatgtacccgagaacttcaatgcactcatcttgcatcttaagattcttttgcacaaaaggaacacaattctgcttggttccagaattgtcttgccttacatcatatttatcaactttcattttcaaagccaaagaaacgaaaatcctacacactcacatgtataaattacaaaatgctaagggaaactacagttgaagcaccacaataaacagaaaaaggaaaccaaaggaaagaaacacaaatattctaatcagcttagcagcctgcttccccacaattcagaattgtaaaatccacacacagaaggtcaaacaccctaacaagctgggggttcagactctcaccattaaggtgtaacacctagagtagttcagtcccagattcagtttaaggttctgacccaaatgaactctcaaattcatcaatctttttttttttttttccggagacggagtttcactcttgttgcccaggctggagtgcaatggcgcaatctcccgctcaccgcaacctccatctcatgggttcaagcaattctcctgcctcagcctcctgagcagctgggattacaggcatgtggcaccacacccaactaattttgtatttttagtagagacggggtttctccatgttggtcagggtggtctcgaagtcccgacctcaggtgatccgcccgcctcagcctcccaaagtgctgggattacaggcatgagccaccatgcctggcttcaaattcatcaatcttagatccaggagacaaaagtcctaacttcacagactttctcaacatgtaaatattacactctgaatgcagcaacactggggatgcaaaacagaaggctgggagtggtggctcatgcctgtgatcccagcacctggcaggccaagatgggagtccctgaggctacaagtttgagaccagcttgggcaatgtatcaaaaccctgtctctacaaaaaacaaaaaacaaaaaaacaaaaaaattagcgctgggtgcagtggctcacgcctgtaatcccagcactttgggaggccgaggcgggcggatcacgaggtcaggagatcgagaccatcctggctaacatggtgaaaccccgtctctactaaaaatacaaaaaattagctggacatggtggcaggcgcctgtagtcccagctacttgggaggctgaggaaggagaatggcgtaaacccaggaggcagagcttccagtgagccgagatggcaccactgcactccagcctgggcgatagagcgagactccgtctcaaaaaaaaaaaaaaaaaaattagccaagcatgatagcatgtgcctgtagtcctagctacttgggaggctgaggtgggaggatcacttgagcccaggaggctgcagtgagccaagactgtgccactgcaccccagcctgggtgacagagtaagaccctgtatcaaacgaaacaacaactacccctcaaatccactgtctaaaaacaggcccaaggaaactacaattacaaccccagaagtatcacgctgttcccctccccaccacgtacatgtggatccccagttttccaatgctcagtttctgtcagtaccaaaggggtctttccttgataggtgtgagtatgtaggacacctgctctccttgataagcgtgagtacgtaggacacctgcaggggaagcaccctaaggagaaccacctgggtcttaattacttcccttggcagagtcaaaggtggccttaccttctagtcactgcctcaggcctccgctcactagtcatgcggctttagaacacttttgatattttaaatgagaaaaacccagtgtttcaagaattcagcaaaatcactcaaaccaagtatttatgtataaagcatggaagcaaactgtaaaacattatctagtttcaaaacaaaacccacaaatatctattccttttggaaaatgaagttaattataaatgattatttaatcactagtcaaactattaatcattaatcatgataaactataatcattagtcaaactaataatgtaatcaatagttaattattataaacaatttttttttagagggggtctcactctgtcacccaggttggagtgcagtggcacaatcttggctcactgcaacctccaccttgcaggctcaagcgatcctcccacctcagcctccaaaataggtgggaccacaggcacgcaccactatgcctgactaattttttgtattttttgttagagacagggtttcgccatgttgcccaggctggtctggagctcctgagctcaggagatccacctgccttggcctcccaaaatgctggggttacaggcatgagtcactgtgcccagccagaagtggttttctaaacaatcatattttaacacacctaggaattgtaagtctaagccctggaattcctcttgaaatcaaccaaaagaaaaaaacgagcctcagaaacttagaagaaaaaggggttaaaataatatttaggctaggcacagtggctcatgcccgtaatcccaacattttgggaggatcacttgagctcaggagttcgagaccagcctgggcaacataaagaggcacgctctctacaaaaaattagctgggtgtggtggtcccagctactcgggaggctgaagtgggaagatcggttgagatggggaggtcgaagctgcagtaagccttgatccccccagtgcattcaagcctcagcgagagggagacactgtctcaaacaaacaaacaaaaaaagcaggatgtaatactggatttcttttttccagaaattcacctttcttggcctttttggaaatattttgtaccatccttcacgctctagtgattgaacacaccttacatttacctaaatactaacacacaatcgagtcgacgttttcaaggtgataaagccggggaggctcagtgctgatccgcaactatgctcaaggacagatcacccagaaaaatttccaaagaggatcctcaacacgtaagatgtctgtgccaaggaaagatactgggaggtgaggcacaaccatttcatacaactaacttccaagctgctatctctgctttcctctctcgtaaaatatccacgaacaacaacaaaattaaatctaaaagactaatcctttgctctgtggaaaatagattattaaaacacagtaagttttccctaaaagtcgtcgagagggtcttagaaactgcgactttatggtataacaaaacctatttgtttccttatcaacgatgtaaggaacattctagaacctggtgcacgtcgtttcgctaaagttgcacccaaggcgggaattctccccatgaccctcccatggtccccgcacaatctgggggagacgcgggcctgcgggcgcggagctgcccagagagggctctggggctgggggcgaagtcaccacgcagggacaggacaggacgcccggggtcccgactgccggccggaccagggccaccctgcggccaaggggaccgagggccgagctgtgccatggggactagagccccagaccccggagtcgcccgcagggaggcccgggtcccgccacagccggtcccagccagcccctcctcccgcgtgtcgggaccccagcccggcacactcaccatttcctggactccagggtgtcccagcatcctcctgatggctctcctggccacagcagggcaaatcgcgacacaccctgagctgacacaccctcagcactttcagagaagccgagagcgacccgagggcgccaaggcgagagggaaaaaaaacccaaacccacgggctttagcgcgtcgccccgcctgctgccctacagcacgcctgattggactgttggcacggccccgccctcagaacccctaattggatagtgccctaggcccctccccctggggtgggggacacagtgcagagaggagaggtaaggcaagcgcctgagaggggccagaatgacagattcttgaccattgcccttgccagcttgggcatcctccctgatccattttcccctatcaataagttaaatgagtccaagatcctcaaacctattgtttaaataagaaaccagcaggacatgccctcgccagaggacattggaatttaagaacttgctcctggctttccagagctggcactggcgtctccctgtactaatgggactttctttcttcttcctcttggacaaaagggaattgcattctcagtggccaaaggaacgatcctcgtgcctcagagcaggaggggtgcctagaccaggtcacactggaacatgggagagggcttgatgtcctccaggggtcaggaatttggaaagaaaggctgttggtggcatggcgaaggcttcctcacaccttatccctcagtctactcattttttcttttttcttttttttttttttgagacagagtcttgctctgtcgcccaggctggagtgcagtggcgtggcatgatctcgggtcactgcaacctctgcctcacgggttcaagcaattctcctgcctcagcctcctgagtagctgagattacaggcacccaccaccacaccaggctaatttttgtattttagtagagacggagtttcaccttgttggtcaggctggtctcgaactcctgacctcaaatgatccacctgccttggccttgcaaagtgctgggattacaggagtgagccaccgtgcccggcctgcctactcattttcagccaaaaaattaaaacacaccaacaagggaatacagttatttaatatatgggaaaaaggggagttatatgacagcaatattctataaaggaataaaaacggaagaaaaggaaacatctgaattggttcatttaagcagtctacactgcactaccatttacaaggaaaacgccaagtgacaaacatattcccaagctggggagtcagactctgttgaaaggggcccaagagtctatcagtccctggtgatgaggcagagaaacctaaggatttaactctgggagctcaacatgtcctcctgttcccacctcatgtgggaacaatcttcccttcaagatctttattttcaaaagcaagaaactctcacctggagtcagtttaaggttctgccctaaactgtcaactttataaacccttcttctaggagacaacccaaatgagacttagtctctaagtctcaccttgacagattgtcttttttttttttttaatttttgagacagagtcttgctctgtcaaccaggctggagtacagtggtgtgatctcggttcactgcaaactctgcctcccaggttcaagcgattctcctgtctcagcctcccaagaagctgggattacaggcgagcgtgaccacacctggctaatttttgtatttttaacagagacagggtttcaccatgttggccaggctagtctcaaactcctaacctcaggtgatccgcctgcctcggcctcccaaagtgctgggattacatgggcctttggtgttcttacacacacacacagacacacacacacacacacacacacacacacacacacaagctccttccccaccccagtcacaaagatactctcctacatctgatgctaactttgtatttttgcttttcatcattttagtgttaattttcacatatgatatgagataaaggtctcagttcatctttctgcaggttaatatccagttgtcccagcaccatgttgaaaacgctttccccattatcttggggcatttgtagaaaatcaacagaccataaatgaagattatttctggtctctctattctgttctactggtctatgtctaacattatactagtaaatctggctaatctactacctgccctgttgatggatggccccatttcattccacatgattgccttgcaggtccagaaatggtttcagagccaggagaaaatctctttattattatttaacttacactgttatttattttgagacagggtctcactctgtcacccaggctggagtacagaggcatgatcatagctcaccacagcctcaaactcctgggttcaagttatcctcccacccagtaactgggactacaagcacatgtcagcatgcctggctaatttttttttttttttttttctgagacagggtcttgctctgttgcctaggctggcgtgcaatggcacaatcatggctcactccaatctcaccctgccaagctcaagcaatccttccacctcagcttcccgaatagctgagactacaggcgtgcaccactaccccaactaatttttaaaattatctgtagacacatggtctccctatgttgctgagactagtctcaaattcctagactcaagtgatcctcctgccttagcctcccaaagtgttgggattacaggcttgagccaccatgcctgggcccctggctatgagaatctgggaagcactccaaccacaagtaaatagttcatccacacctggatactccaaaatcactgcaccctggatacactgactgtctgcccagcaaggagagtgagcgaccactgctggaaaatactgcttttatgtgcatgacatgagaaaaattgtgtctagtttacacattctaaaaaagaaggccgggcacagtggctcacgcctgtaatcccagcactttgggaggccaaggcagatggatcacaaggtcaggagattgagaccatcctggctaacacggtgaaaccctgtctctactaaaaatacaaaattagccaggcatggcggcgggtgcctgtaatcccagctactcgggaggctgaggcaggagaatcacttgaacccaggaggcagaggttgcagtgagccgagatagcaccattgcactccagcctgggcaacaagagtgaaactccatctcaaaaaataaaataaaataaaataagagatggagtctcactatgttccccaggctggtcttgaactcctggcctcaagcgatcctcccacctcagcctcccaaagtgctggaattacagatgttgtgtcaccacacctggccaatagttataaatgttataacatttctttgatgatgcaaattttctggagcactatacatgagttaatttggattggattttcccaaattacttacattatgggatttctccccaatgagcactgggatgaggagacttcaatccaccaaagttgtatatatatatatccatggaggtgatacttaggtcatctcatcagaaaacactcatacttgtccacaaatagatgttgcatatggcattagtaccatcctcagaaatttatatatatttgcaagaaatattattttaagtcaatagtatatgctatcatgaatacaggatatgctcactccataagcagcaaattgactccttcacagttttaatagatttccagttgttttgtcttcagtctcctaagaagacaatgctataatctccaaccacattatttgcttcttccatcccattcttcatattgatcattgttgtgtgacattagttgactactgtaatgataaataactagggtaaaatagatacatttgctctttcttaggttccattcctcctttcagtgggaagcctcacacacactctcatcatgctctgctatgaaacatagcttaaccaagaatcgtatatccagcaaagctcatgttcaatacaaaacaaaaatttaatttttctgttatgctgatgaaaaagtgtaagtgatgttcttgccttctaacactgttatcgctgccacagccacttggtcaaggatcatcaagcagattaaggcaatttacacccatttcaactttttttttttcttcttgagaccgagtctcactctgtcacccagactggagtgcagtggtaggatcttggctcactgcaacctctgcctcctgggttcaagtgattctcctgcctcagccttccaagtagctgggactacatgcgcatgacaccaggcccagctaatttttgtatttttagtagagatggggtttcaccatgttgaccaggctggtatcaaacttttgacctcaagttgatccatctgcctcagcctcctaaagtgctaggattacaggtgtgaacaagtgtgcccagccccacctcaatatttatacaatttatgttgccttgattctaaccctgactgtaccacagtgtacttatggaagagcttcacaattgcagatgcaactgtgcttactgcagaggctgtagatgccctaaagcccaggacacccaaagcatattggaagccattggagtgagggagtaagtgatttcaggggtttccccaagactgatacagcagtcaggaatatcttaaatgttgcaaagaaagttggtggaaaggaaactgaagatatactgaaatcctctacaagtgatgatgatgatgatgatgatgatgatgatgctgctgatgatgcagaagattaagaagaggagcagtgccattgatttggacacgcgaaaaatttgcagcagatcttggggcatctatagcctctgcaagttgcaagtgttaaagataatcaacctcagctaacatcctttgattgaaaaaagcttctgtgtcatataagggaaaatatgctaatgaacactaaggtttttttagggattcaaagaaaaagaactagcttcctaaaacaatgcttctaactaaatatctgcaaatatgaagacatacccttcaacacaaacatcttcagccctcaagctgaacagatgctgacattagtattagcctcctgcaaagagtcaacatcttcaatcagaacctgggtcttccaacatagatgaaggtcttgatgtcctgtcaagattcaagttagcctgaggtctcactgtttatctatgatgccacacatctagtcacctctacacatcacattaggcaccatacagcaatcatcattgtcataaccatcgtaatacttgggttatcaagagagaagaaccagaattgtggttggtgttaacacattctttcaggtcattagacaaaagtaatctgagtattgaaacaagaaactgtaacattataggtgatatatacgatgtagataggcctgcaatggttgggtctgtactgaacacatatagattttttttcttatgattccctaaacaatacaactatgtacacagcttttacaatgcatgagatattttaattaatctagacatttatagagtatacaggagaatgtgggtaggtacatgcgaatattccattttataaaagagctggcatctgtggatttaggtatactcagggtgtactggaaccaatcttcttgcatatagcaggcagcaactctatttgaaagaaatggaaacttttttttttttttttgagatggagtctcgctctagcacccaagctggagtgcagtagtgcaatctcggctcactgcaacctccacctcccgggttcaagggattctcctgcctcagcctcctgagtagctaggactacaggtgtgagcaactatgcctggctatttttttttttttccgtatttttagtagagacagggtttcccatgttagccaggctggtctcgatctcctggcctcgtgatctgccctcctcggcctctcaaagtgctgggattacaggtgtgagccgctgcgcccagcctggaaacttcttaaggctttaccacgtttacattcacaggatttatttctttcaagtatctgaatgtgataaaaccaatgaatgctttcccacattccatacacttatagaatatccttccagtgtgtccttttatgtctattaaaggaactgagagaactgaaggctttcccacattccttacattcatagggcttctctccagtgtgagttctttcatgttctcgacagaaactggaacgactgaaggctttaccacagtgtttacattcatagggtctttctccagtgtgagtcctttcatgtcttagaaggaaagagggccaaaagaatgctttcctgcattgcttacattcatatggcttctctgccgtgtgagtcctttcatgagtttttaagtaactgaaacgactgaaggctttgccacaaatttgacactcataagatttttcttcactgtgagtcctttcatggcgacaaaagtatttaaaagaactaaatgctttcccacactccttacattcataaggctcctcttcactgtgtgttgtttcatgactttgaaaggaaaataaatcactaaaagcttttccacatttacatttatagggttgctctccagtgtgtgttgtttcatgttttcgaagggaactggaagtacggaaggctttcccacattgcttgcattcatagggtttctctccagtgtgagtcctttcatgtctttgaaatacactaggagaatcaaaggctttcccacatactgtgcatttatgagggccatctccagtgtgtgccatcatgtgtcttcgaaagcttgagcgatgagataacaatttcccacattgcttacattcatagggtttctctagagtgtgagttccttcatgaattcgtgctgaaccaggaaaatcaaagcctttcccacatatcttacatttatgaggtccatctccactgtgcattatcatgtgtctttgaaagcttccaagatgacaaaacgctttcccacactgtttacatgtatagggtttctctccagtgtgaattctttcatgtactcgaagggaaccggaaacactgaaggctttcccacattgtttacatttgtagggtttctctccagtgtgagttctttcatgtcttagatatgaactgtaatcagggaaggctttagaacactgcttacattcatacggtttctccccagtgtgtattttttcatgtcttagataggaactgtaaacagggaaggctttagaacactgcttacattcatatggtttctctccagtgtgagttctttcatgcatacgtaataaactgggccaaaaaaaggctttcccacacaattcacatttataaggtccatctccaccttttactaccatatgtcttcgaaggtttccaggagaactgaaggtttttccacattccttacaatcatagggtttctttccagtgtgaggcctttcacatgtttgaaaggagtggcgataacttaagcctttcccacactgcttatgtgtatatgacttctctgcatattcatgacactcccggtgtttgtgtccagtatcaactctgatgtagcaattcagggatgaatgacccattatgacttctccattcacactgcttccacatgcatctactctggcgggagtgttcttgtttacaatactatttcgaatctggcttaaggtttctccacactgactaccatctttacttttaccaaatctctctaccacatcacacctgtaaaaaatgaaaagtacattactaaaggtttattattgaatttatatttatcaacaggtattagatttacatttttaacattatcaggcaagctataagcttcatgtcctgcttcaatgtgaatggactgaatgttgtgcaagataactcaatcccagctattttcaagacaatgatatgcacatggggattcttaattcttttttttttttttttttttttttgagatggagtctccctctgtcatcaggctggagtgcagctggtgctgtctcggcttgctgcaacctccgcctcccaggttcaagtgattctcctgcctcagcctcccaagtagctgggactacaggcatgcaccaccacacccagctaatttttgtgtatttttagtagagatggggtttcaccatgttggccaggttggtctcgatctcctgacctcgtggatccacccacctcggcctcccaaagtgctgggattacaggcataagccactgcgcctggccttttttttttttttaagacagggtcttgctctgtcacttaggttagagtgcaccagtgccatcacagatcactgcagcctcaaactcccaggctcaagtgatcctcctgtctcagcctcccaaagtgctgggattgcgggcatgagctaccacacccagcctcatatgggaaatcttaatattgtttccatgggaactactttgcaaacactgaatagctatgtcacatttaataatatatttatgtcacatttaataatatatttttatagagaaatttttctaagaataaataaatttaagctgggcttgttcataatctttgcttctttttaaaagttcttgtcattctcagaaacactgcaaggacatcacctgtctcttataagtacaaattaccttggatttctcctgagattttggtgctgatcatcaatgttctggttttcccatttcattcctaaaagagagatccagaaaattcactataaattattacaaaatgatacaaaaattgttaagattttatgtacactacaatcatgtatgattcattcattgaactatagttgactcctgaacaacacaggtttgaactgcacaagtccatttatatataaatgttcttcagtctctgctacccctgagacagcaatatcaacccctcttcttagttagcctactcaatgtgaagatgaggatgaaaaccttcatgatgatccatttcaacttaatgcagagtaaatatagtttttcttccttaagattttcttattaatatttactttctctaggccgggcatagtggctcatgcctgtaatcccagcactttgggaggccgaggtgggcagatcacaaggtcaggagatcgagaccatcctggctaacatgttgaaaccctgtctctactaaaaatacaaaaaattagctgggcatggtggcgggcgcctgtagtcccagctactcaggaggctgaggcaagaatggtgtgaacccgggaggcggagcttgtagtgagccaagatggagccactgcactccagcctgggcgacagagcaagactccatctcaaaaaaaaagaaaaaaaatttactttctctaacttactttattctgagaatacagtatgcaatacatatgacatatatgtgctcgtcacttgtttatatgactgataaggctgctggtcaaaagtaggttaagctgtggcagacaaaagattatatgaggacatacaacaggttggggcctggcacttcaccctgtgttgttcaggaatgaactgtatcccttttccatatttcaaatcactgaacagcattgatgaccacaaaacaaatgtctctaattgaccaaatgaagacatgatgtcatccatacctatacagttcaggttcctaatggtttctcgcatcacatctctgtagagattcttctgtgatggacccagcaaagcccactcctcatgggtgaagttcacagccacatcctcaaaggccactgagtcctgaaacatcccatatgtccagaaaaggaaggttgaaactcacagtactgagaacctatactcaccttcataaacttcccatgatgctgtggtttccaagcatttattcaatgacgtggtaaatccactcttattctgtgtctgcactcactgtctgatgctggaattctgatgctggaattgggcttgctaaaataacagttgagtaggaacatatctcttattggtgaattatgcaagtgaatcttattgcctggattactcctaatgtctgtttctacagtgggtctgtagtccttgtcatgacaaagtcctaccacctactgtgcaaaagagagttacaattagcagtcctgagacggcatatccttacaactgcttgttcacaatgttgaacctttcgtggtgtctagacaatgtatttaggggagggccccgtaagcataactaataaagggggtggagtgtgcctaaactatttgtgtaaaaattatggtatttgcttaactcctaacttccctctgagagtttggaattgtattacatcctcagcagaggaagtgtacccaatcagccactgctaggtttgaatgtcttcccctccaaaatgcaggctgaaactgaatctccaatgtggaagtaatcaaaggtagtggtttaagaggtgagtgggtcttgagggtttggaacacatggatggattaatccactcatgtatgaatggcttaataaataaactggttatcacagatgaggttctggtgtccttatgagaagaggaagatacttcagctagacactcagccccctcatcatgtaatgccctgtaccacccagggactctacagagtccccatcagcaagaagattcccaccagatgcccactttgaccttacttgatcttcccagctttcagaactgcaaaaaataaatatcatttcttatagattaccccagttctggtatcctgttgtaagtaacaaaaaaacagtcttatagactaagacatacacaaagaaacactctaggcacagggtccctaatgtgcaactctggtagatgatatttcatatttttgttgttgttgttttttcaatgtcttacttgggggatttagcctatcctacgtgattacacagagagaatatttggaagctggtgactggttccctgtagatcaaatgtagttaagtatgacaaaagactaataaaagagattttaccaactaaatagaaaaaattgtaactttctactgggtaatgtcgaaggagaaagaaaagaagaggacagactgcaaatgttcttagacagaattcagtgtcagctttcatgaatatcaattatattccataaatctcaacagcagacatttaataatcaataacattacataaaccaatttttatagaagtcataaatgtctaaagatgcttaaaaaaaaccttctcatcaagaaagtagacagctttacaaaaacaaacagaagatttaaaactgtaatttttcacatcccatactattaacagagagaaaaagatacataaacaggaaagtgaaaaatgatagaaaagccttgtattgttttttctttggccccatctctgcccatctcattgccagtcctgaagacagcagagttcccagtgtagaactctgatcaccacagagtgtacagatcacattttgtttccacattattgcctttgtatttttgaatcagtctggggactaaccgaaggtctgaaacaaggctctcttttctatttcatctacaacagaatccaatcagagtcaaactgggcaggaactactttaaaatgttgtaaaatacacaaaaagtgtgcaaccacctaggacaacacaagatgactaagacatacattagaaggccaggtgtggtggctcacacctgtaatcccagtactttgggaggccaaggtgttgggaacaggcccccaaatctagccataaacaaaatctctgcagcactgtgacatgctcgtgatggctatgacgcacatgctgaaggttgttggtttaccggaatgagggcaaggaacacctggcccacccagggtggaaaactgcttaaggcgttcctgaaccacaaacaatagcatgggccatctgtgccttaaggacaagttcctgctgcagataactagccagagcccttccctttgtttcccgtaaggaaggcttttagttagtctataatctatagaaacaacgcttatcactggcttactgtcaataaatatgtgggtaaaactctgtttgtggctctcagctctgaaggctgtcagccccctgatttcccactccacactctaaatttctgtgtgtgtgtgtctttaattcctctagtgccgctgggttaggctctccacgactgagctggtctcggcaccaagggggtcagattgcttaaaggcaaggagttcaagaccagcctgggcaatgtggggagacctcatctctacaaaaaataaacaaaattaggtgggtatggtggcgcatgcctgtagtcccagctactcaggaaagtaggagaattgcttgagcctaggaggttgaggctgcagtgaaccacgattgtgccactgcactcaagtctgagtgaaagagtgacactatttcaaggaaaaaaaaaaaagacatatattagaccatctaagtcccaggagaaaaggctagggtataatttttctttacaaataagcatatttgaaagcacccagatatactggggaatggagaaagccccacgcaggcacaggaaacaatatatttttataaaagatgggtggggattctgtttttcagctctggctaacatccagatttaaacagaaagagaaggctacagtagtaaatactgtggctaagtgctcaaagaatgccccagcagagagccatccatgaagactggaagaggtcaggtttttgtttgtttcatcttcttttttacttttagcttctaacattcaggaaatctctgtcagaacgctggatgaacacaagctaaagtcaggaaatctctgtcagaacactgcatgatcacaagctaaagaacagagacttcagtgtttatacccagtaggaaatacagtctctgcaaactaatttggaaatgttactaaacaaatgaataggccaggtgcagtggctgaagcctgtaataccagaactttgggaggctgagggaggaggaccacttgaggccaggagtttgagaccagcctgggcaacatagtgagattctgtctctatttaaaaaaaagaaaaagaaatgaataatttcagccttcaagcaagaataccaaacaattaaggggcaaaaatctgatttccagagttacccagttataacattcaaatgtctccttttcaatacccccacccccaaaaaaaccccagagaaataaataaaacagagaaacatgaaaatacgactcattaatggaaacaatttgagataaatctgagaaacctcagacactggatttactgaataaaaacagtaaagcaactgtcttaaatatatttaacttagtaaagacaataataaacaaagaactaagagaaaaccagaaaattgatgtagggataaaataataccaaaatatgttaaaaattgagccatatagaatttctgcagctgcaagatacaacaacttaaatgaaaacatcactaaaggtattcaacagatgtgagcaaccagtggaaaaaaaaaactaaaatgaaggtaaaacaattgaaattacctggtctgagttaaaaaaaaaaagaagttcatcagaaagaaaaaaatgatatgggttagaaattcagattgtgtgtgtgtgtgtgtgtgtgtgtatacacacacatatatatgaagagtgttaggaaacaattaaatgaaggcacaaaaaattctttactcttcttatacctatctgatctaatagatataggtttattcaaaataataatatcaaattagctgggcgtggtggtgcacagctgtaatcccagctactagggaggctgaggcaggacaattgcttgaacccaggaggcagaggttgcagtgagccgagatcatgccattgcactccagcctgggaaacagagtgagattctgtctcaaaagaaaaaataataatatcaacaatgtattcagtagtttatagctcccagttgaactaatgaatgaaagtaatgttatatgtgatgggaggaagaacagtctatcacacttcggaactgtctattataccagcactattcctgaagccagtatagtactatttgaaattgaaggcccattagttgtgaatgctatactacaaactctggggaactcactaatagaatctaagaaaaagtagactatatagatatataatatagaaaataaaatcatatagaatgctcagctaaaaggaaaaagggcagaaaagagaagttaaaaaacacagagaagaacaacaaatagaaaacaataatatacatgtttatctgaatccaattatgccaactgccacttaaatgtgtattatctatattcaccagtaaaaaagaaagggactggcagagtgaaataaaaaacaaggccccaaactatatttttaaaaagtattttaaacagaaagacacagatacattaaatacacaagtatgaagaaatacatgccattctagccctgatcaaaagaaatttggaagacctatattacattcagacaaatcaggttttagattttttaaaaattacaagggatagagagatttcataatgatcaagaagtcaatcctacacgacataataatccttaacatctatgcccataaaacagagcatcaaaatacataatgcaaaaacatataaaaccacaaggcaaaatacacaaatctaggattatagttgagggaaaacaactcacctctatcaataattgacagatcagttctgcagaaaatcactaatgatatagctgaactcaacagcactatcaatcaactggatttaattgaaacatatttatagaatcattcattcaacaacagcatacatattcttctcaagcctacatgaaatattcaccaagatgaacaatattctcagccataaaacacacttgaacaaattttttaaagtatgcgatcaaatcatattagaattaatgtaaaaattagtaacagaagcatagttgaaaaacctcaacaaagtggagattgaagccacaaacttctcaactacacaaacttcaaggagaattgtcaagcaaaatgtaaatattgcaatgttgatgaaaagtgatatatcttagcaaaatctttggaatggagtaaaggcagtgctttgagggaaatttaaagaattaaatgcatttcctagaaagtaaaggtttaaaatcaacaccctaaccttccattttaggaaactagagaaaaatgacaagattaatgtaaatcaaacagaggaaagtaacgatgagaagagatattaatgaaatagcaatgaagaaatcagtagaaaacatcaacaaaccaacagatggttctttggaaacatcattaaaattcataagcccatagccaagttaactcagaaaaaagaggagccatcactactactcccatggacagtaaaatgaccataaaaaactattaggaacaactaagtgcccacatatttgataaaattacacagaatggaccaattccttgaaagacactatctaccaaaactcacaaaaagagacctaagtaatatgaataggcctgtatctactgaagatattaataaataataaatgtcccagaaaaaataagcaacaggtcagaacgatttcactgctgaattctggcaagcgtttatggaagaaatgataccaattctctacaatctcttccagaaaacagaagcagaggaaacaccttctattccattttataaggccaacattgccctaacaccaaaactagacagacattacagacatatctccaccatgtgaggacataagggttagactgccatcttcaaaccaggtagcaggcccttaccagaggcctcatctgcttgatattggactttcagcctctacacctttgagaaatgaatgtttgttgtctaaggcatgcagtgtatggcaatctggtatagcagtcctaagtgactaagagaggtagactctttctctacacacattaggctttgaagtctacaggaatcaggtcactggtctcacatataggcattaagctccctgccaagataaagaagtgataacctacaggtcacatttggcaggtttccaaatcaacccacttggagaagtcttcttttttttttttttttttgagacggagtcttgctctgtcacccaggctggagtgcaatagcacgatctcagctcactgcaacctccgcctcccaggttcaaacaattctcctgcctcagcctctcgagcagctgggattataggtgtccgctaccatgcccggctaatttttgtattttttagtagagacaggatttcgccatgttggtcaggctggtctcgaatttctgacctgaggtgatccgcccacctaggcctcccaaagtgctgggattacaggcatgagataccacgcctggcgagaagtcttctaattaaatggcttacattctgtctgtgagtaaaggatcttatcatgagtccctcaaatcttattgtgagttcttcaaactgttgatatgattaacgttatctactaacatcaaaaaagacactgatttatttctgaatcatgttttgctgattgtcttccacttagaacattttagcctgtcagctgtcatctataggcaatgattgtaacgtctatattgtacccttcaaggaaaatgacaattccggtatgaatagtcctccagcttctcctaaactttctcataaaggcatccaacttgtaatcaattttggaacacatccaaatttgttggtgtgtcttctcaagttgatcctcaaatttggcttacaataaaactttatcaaattgtatctgcctcaatggccttatttttggtaaacaaaagtatcccatgaaaggcgcaatgtaaccatccccaaccaaatccctggagacacaccagagcagagataaagtttatagccagtttcaagagacagacctaaagattaaattagaagaatatacaacacctatgaaagacaaaagcagcacacttttagaaattacagaaatttttttttctttttgagacagagtctcgcactgtctacccagacttgagtgcagtggcgtgatcttggctcactgcaagctccgcctcccgagttcatgccattctcctgcctcagcctcctgagtagctgggattacaggcatccaccaccacgcctggctaatttttttgtatttttagtagagacggggtttcaccgtattagccaggatggtcatgatcttctgacctcatgatccgccctcctcggcctcccaaagtgctgggattacaggcataagccaccacgcccagccagaaaaaatgtttttcttatttaacaagagtcttcttatataagaaaataaagtagcttccaaaggagaagtctggtaaattgaactctaattacattaagaagaagcaggcatagtgactcacatctataatcccagtactgtgggaggccaaggcaagaggaactcttgaggccaggaatttgaaaccagcccggcaacatggcagaccctctggctacacaaaattaaaaaattagccaagtgtggtggcacatgcctatagtcccagctacttgggagcccaggagtttgaggctgcagtgagctgattatgccactgcagtccagcctgggtgacagagctggacattatctaaaaaaataaaaaatttaggaagagttcatctaagtagaataaatttaaaagataaaccaccatctgaaaggaaatattaccaatccctccatgtaaaaaaggattcgtgtataaagtatgcctaaaacaaaaagagagaaacaaagcaaacatttgcatttactatgcaaatgaattaaatgactgagaattatttcacagatgaaagcccacaaaggcggtatgttcaacatgaatgctaatccagtaaaaacacaatatataatcatatggagataatacataatcacatggagataactaaaagataaatattaaaaggtatagcttcttctccaagaaaacaccaaatggctgatgacgcaggtgcagcgcgggggtccagaggccctggggaccctgggatggggaaccgcagtggcttccgcggagatttcggcagtggcatccggggccggggccgcggagctctgagaggcaaggccgaggataagaagtggatgcccgttaccaagctgggctgcctggtcaaggacatgaagatctagtccctggaggagatctatctcttctccctgcccatcaaggaatctgagatcattgacttgttcctgggggcctctctcaaggacgaggttttgattacaccagtgcagaagcagacccgtgccggccagtgcaccaggttcaaggcgtttgttgccatcggggactacaatggccatgtccgtctgggagttaagtgctccaaggaggcagccactgccatccgcggggccatcatcctggccaagctctccactgtcctcgtgcgcagaggctactgggggaacaagatcggcaagccccacaccgtcccttgcaaggtgacaggccactgcggctctgtgctggtgcgcctcatccccgcacccagggacactggcatcgtctcagcgcctgtgcccaagaagctgctcatgatggctggtatcagtgactgatacacctcagcccggggctgcactgccatcctgggcaacttcgccaaggccacctttgatgtcatctctaagacctacagctacctaacccctgacctctggaaggagactgtattcaccaagtctccctatcaggaattcactgaccacctcgttaagacccacaccagagtctctgtgcagaggacccaggctccagctgtggctacaacatagggctttcatacaagaaaaataaagtaaattaagcctgaaaaaaatgtataaacagacatgtatgcattgtttgtttgtttgttttttgagacagattttcactcttgttgcccaggctggagtgcaaagacgcgatctcggctcactgcaacctccacctcccgggtccaagcaattctcctggctcagcctcccgagtagctgggattacaggcgcccgccaccacgtccggatattttgtgcttttagtagaaatggtgtttcaccatgttggccaggctaatctcaaactcctgacctcaggtgatccacccaccaaggcttcccaaagtgctgggacaacaggcgtgagccacagcacccggcctggtcagacagttaatccacacatgctattatgatttcctagtaaactgaagtttgtctataatctataacccagcaatgttcccccatgtgttgaaaaattcatgaactgttagcatgtagagacaaaaccaaaaataacattgtcaacaacatcaaaaaattaacttaaaagtcaagtcctggccaggcgcggtggctcacgcctgtaatcctaacactttgggaggccgaggctggcggatcacgaggtcaggagatcgagaccatcctggagaacacaatgaaaccccatctctactaaaaatacaaaaaaattagccaggcgtggtggcgggcgcctgtagtcccagctactcaggaggctgaggcaggagaatggcgtgaacccgggggtcagagcttgcagtgagccgagatcacgccactgcactctagcctgggtgacagagcgagactccatctcaaaaaaaactcaaaaaaaagtcaagtcctatgagcactgcaatgtgtgagtaaactgcatgacccatagcctcagattttagcatgtgtcaaacagattgaggcaaataaagaaaacaaaaatcttttcagcacaatttttgtgtttttcccccgttcatcctttcttgatgtctctgaatcaaatcaatattctctagtgttccaatttagttactaattatatttacattttagtgatatctttttgcattatattttaacaggttgctctgatgaactagttctcatgcatgagaatcatctgaagggcttgttaaaaaacaggccattggaggccgggcgcggtggctcatgcctgtaatcccagcactttgggagaccgaggtgggtggatcacaaagtcaggagttcgagaccagcatggccaagatgatgaaaccccgtctctactaaaaatacaaaaattagccgggcgtggtggcgggtgcctgtagtcctagctgctcgggaggctgaggcagaaaattgcttgaacctgggaggcagaggtaggttgcagtgagctgagattgtgctactgcactccagcctgggtgaaagagcgagacttggtctcaaaaaaaagaaagaaagaaaacagatcattggggctggttgcagtggctcacatctgtaatcccagcactttgggaggctgaggcaggtggatctcttgaggtcaggagttcgagaccagcctggccaacatggtgaaactccatctctactaaaaatacaaaaattagccaggcgtggtggtgcacacctgtagtcccagctactcgggaggctgaggcagaggttgcagtgagccaagattgcaccactgcactccagcctgggcaatagagtaagactctgtctcaaaaataaaaaataaaaaaaaaatcattgggccccattccaagaattactaattcagtagccttgggtaataccctaaaatgtgcattccttttatatatatatatacacacacacacacacgtataatatatatatatatacacatatatgtataaattatatatatatattcatggagtaccagtgcaattttactacattgatatattgccttgtaaagtcaggcctttcagtgcatccatccctggagcaacccccattatccaccaaataacctccctcatccccatgagtcttcactgtccacatatatacacattcttctttttttttccttgagacggaatctcgctctgtcacccactgcagcctccgcctcctgggttcaagggattctcctgcctcagcctcccgagtagctgggactacaggcatgtgccaccacgcctggctaattttttgtatttttagtagagatggggtttcaccgcattagccaggatggtcttgatctcctgacctcgtgatccacctgcctcagcctcccaaagtgctgggattacaagcgtgagacaccgtgcctgtccctgtacacattctttaactaccacttataaatgagaacaggcagtatttgtctttctgtgtctgagttgtttcacttaagatcatggcctcccattccatccatattgttgcaaaagacacaatttcattatttttaatgtctgaatagtattccactgtgtgaatataccacattttcattattcaatcttctgttgatggacacttaggctaattttgtatgtttgctattgtgaatagtctgcaataaacacatgagtgcagggaactttttgatgtaatgatttccactcctttgggtagacaccctgtagtaggaatggcttttcagcattatatggatggtatgttaatggtagtattaactaactggaaactgaagaggcaaaattatgcttatgggtgaatacatactgaacctataatgagtaacaatgacaaattcagagttatggttctgacccatggtgtattttatctaacattacttctgacagcaaatatgtagcatttgctgaacacgagccaattctccaagaaaaactggtgttcaataattcaatgctgacaccacttaacatttccacagaccccacaaattgagggctcagttccacaacagggaccctactgcagatgccaaatgcaagccctagggaccacccttttaaccaaatgtgtataaaaccaacaactctactatcagatttaataatttgctacaacaagttgaagaactcagttaaacaagttgcttaaggttatcagtttgttataaagtatatgtcaagaatacctaaatggaagacatatgtcagccctccaagacattttaatttgtgcaatttcactctaattaaaccaactcactgaatacaaaaccaagcagctgataaagttcaattttacaaaagccctgtaatcctggtaataaacatgatttaagaggccaggcacagtggctcacacctataatcccagcactttgggaggctgaggtaggcaaataatgaggtcagaagtttgagaccagcctggccaacatgatgaaaccccatctctactaaaaatagaaaaattagccaggcatagttgcacacgccagtaatcccagctactcaggaggctgaggcaggagaatagcttgaacctaggaggcgaggttggagggaggcggaggttgcagtgagccaagatcacaccattgtactccagcctgggacaaagagtgagactccgtctcaaaaaaaaaaaaaaatgtatatatatatatatatatatatatatatatgaaatcacctgacccccaccaccatgcccagttctttctgttctggacaagtagcccagtgcaaagaaacatccttcactgacatcaattctggctcccgcctttttaacctgtaacaaggccctccaaattcccattctttgtcttataaataactagctgaacagttttgcctctactgattactctgaacaaaatgcttccaaaggaaacttgtggccaggcctgatggctcacgtctctaattccagcactttgggaggctgaagtgggtggatctcttgagcccaggagttcaagaccagcctgggcaacatggtgaaaccctgtctctacaaaaaatacaaaaatattagctgggcatggggttgtatacctgtagtctcagctaccctgaaggctgagatgggacaatcccctcagcctggggaggtcaaggctgcagtgagctgtgatggccccactgcactctagtctgagcaagagtgaaattgtgtctcaaaaaaacaaacaaacaaaaaaacagaaaagaaaggaaactatttaagtttctctctttcttctaggccactgatttttgacacaccctcagcctaagccaaaacacaacccctccttcatgactcatcccatgaacaggcttgagtcagggtaaaacactctgtgatctagaatctgattttcaccctccatcctgccctctccctctcatttcctttgtaatgttggttgctcttcaccttgaaaacaactttccacctaagctttaagacgctttcagatcttatacttagtgctcttctcccttatgtagcgctgttttagaataaactcattctttttttttttttttttttgagatggagtcttgttctgtcgcccaggctgaagtgcagtggcatgatctcggctcactgcaagctccgcctccccagttcacaccattctcctgcctcagcctcccgagtagcacccgccagcatgcctggctaattttttgtattttcagtagagatggggtttcaccatgttagccaggatggtcacgatctccggaccttgcaatccgcctgcctcgacctcccaaagtggtgggattaccggcgtgagccaccgtgcctggcctagaataaactcatttcttagctaaatccagatttatcttacctgaagactgtctagtgacagccctacaataacaaacacaacctcagacatggcatcaccccatctgcctctgcctgtggatccccagatttccagtgctctgtagcttctcttagtataaaaggctctttggctgggcgtggtggctcacgcctgtaatcccagcactttgggaggccaaggcgggcagatcacctgaggtcgggagttcaagaccagcctgaccaacatggagaaaccccatctctactaaaaatacaaaattagctgggcatggtggcacatgcctataatcccagctactcaggaggctgaggcaggagaatcacttgaaactgggaggcagaggttgtggtgagccaagatcatgccgttgcagttgcactccagcctgggcaacaagagtgaaactccgtcttaaacaaaaaaaaaaaaaaggctcctcccaggccaggcacagtggttcacgcctgtaatcccagcactttgggaggccaaggccggtggatcacaaggtcaggagttgagaccagcctgaccaacatggtgaaaccccatcgctactaaaaatacaaaaattagctgggcatggtggcacacgcctgtaatcccagctactgaagaggctgaggcaggagaatcgcttgaacccggaaggcagaggttgcagtgagctgagatcacagcatttcactccagcctgggcaacagagtgagactctacctcaaataaataaataaataaataaataaaaataaaaataaattttaaaaaaagctcctcccattgctggagtgattaggctgggacacctgcaggggaggctccccaggaagaaccaactaaactgggcccacaatgacctccctttgcaggctcaaaattggcctccacttggagtcactggcctcaagcctctccaccccagtcaaggccatttgcttaccctttcatgccttacgtggatttaaaacataaaacaaacaaacaaaactccatgtgtgatgaatctatcaaaatcactcaaattcagtgtttacaggagggaaggaaattgtaagtcacttctattttatagctcaacaagaaaagcacaagtatctatccatctcagataataaacatcagttactacttccataataatgaagcctttagtaaacaaaggatatttaagttctttagctattgcaaagtcccacagaatgttgcattaatctgccaagtccagataacaggaacagaccagacttatccactgtcccaagttctccagcctaaaaagaagagaaactaaagttttgataaagctttataattcaaccaaatacctaccacacattcttgtgaaaatatattcatttttctgcagccaaaatggaagagttttcccaaatttttcccttggtagtatttacactgctaagccctgaaattccatttgaaatcatccaataaaagacctgagaaacctattacatggtctctggggtaataaaagtaaataaaagttttttaaaaatgctccagcctgggcgacacggtgaaaccccatctctaccaaaaatacaaaaattagccaggtgtggtggcgcacgcctgtagtcgcagctacttgggatgctgaggtggaaggatctcttgagccctggaggcagaggttgcagtaagctgagatcgtaccacagcactcctgggtgatagagggagaccatgtctcaaaaaaaaaagaaaaaggctgcgtgcagtggctcacacctgtaatcccagaactttcattggccgaggcgggaggatcacctgaggtcaggagttcaagaccagcctggccagcaaggtgaaaccctgtctctacttaaaaatacaaaattagccaggcatggtggcatgttcctgtaatcccagctattcgggaggctgaggaaggagaattgcttgaacctgggaggcagaggttgcagtgaaccaagatagtaccattgcactccagcctgggcaatatagtgaaactccatctcagaaaaaaaaaaaaaagaaaagaaaagaaaaaaagtttttaaaaaatggaatagggcctgggtccagtggctcatgcctgtaatcccagcactttgggaggccaaggcaggaggatcacttgagcccgggacttcaagaccagcctggcaacatgaggaaaccccatcactacaaaatactcaaaaattagtagggcatggtgggcattcccagctactccggaggctgagcccaggcagtctaggctgcctaagctgcagtgagccatgatggtgccactacactccagcctgggcaacagagggagaccctgtcttataaaaaataaaaataataaaaaaaaggaatagaaaactacatatatataatttgttttctgaattccaactctttctggcctctttagaaacactttatcttctctataatctctaatgataggatgccctttacagttaataaaaaattaaattggaaataactgaacaaatcttttcagggtaactaacccagggtggggcagaactgactggaacacagacaagtctcactcaaccgtcaggtcaggtcgttctatcacctggcacatccgccagccccacggtgctcattgaagtgctcagcaaccacattcctaggagacactgccttatgtctttttcaggctcatgcaaaacctcattgggtgggtttttcagtttttagaaacagttttctagcttcacagtcggagagagtccagaaggcagaaatcatttgtcttgtcccctgaataacaccatccaattttctgataagccatgcgtcaccaaggaatggaaactaggcttggggaaaaaaatgtcaatgtcccagaggttaggtttttttttttttttttttttttttgagacagagtttccctcttgtcgcccaggctggagtgcaatggcatgattgtgatttcggctcactgcaacctccacctcccaggttcaagtgattctcctgcctcagcctcccatgtagctgggattacaggcacctgccaccatgcccggctaatttttgtattttcagtagagatggggtttcaccatgttggccagggtggtcttgaacccctgacctcaggtgatccgcccgcctcggcttcccaaagtgctgggattacaggcgtgagccaccgcgcccagcccaggggttagctttttacaggaatgatataccagaagattcctcccaccccagtgcatccacctgatcctttgggaggccccactccaacacctcaggctgtcctctgggaagagtgacccaagggccgatatccactaggccctccatgagattggcagcttccagcatcttagggtagccccagaaagttccataacacagggcctggaaaagatacagggtgggctgaggtcacatcaccctgtaaaggacatactgagaaggcatctgtgcctaggggagataaaagaggcacaaaggtttggttttttttacagcagtgtcaggtggttattctcttcttcctcacatgtgaaatgttaaggaaaacaaaataaatctgtttaaaaagagccatacattgctatctgaaaacaaacgacaaaattctgtgtctatttgaaatatcgtcttgctgacaaagggttcataacgttactgggaattgaggagtgaagttagcatatggaaggctctggaaaccaaaagatttactgttagccccaagaggagttaggatgaagggacaggtctcaaagaccctgatgccaatatctttgaaagcctcggaggagaaatggtcgcccttggaaagaaaggactgaagagcacagagaccacagctcctcccacacacaaaccccacacacgagtctggtttgtgcctagtgaccctcccaccgtcaccgtgcagcctcctcaccgggctcacaggaactgcgagccaggctggaggcgagattgcagttagatattaaccaggtgccctcagccccgctgcttcacaggaagccgcctccctgagagtcaggtcacagcagacgctgaccgccggcttccccattggcctggggataagatctctgagagttgctcaagagtcgtctaagttctttctcagatcttgaattccagcggaaaggctggcgccaagcaggctgaagaccccacaaggaagcccactcagcagcagaatgcggtttcttcacctccagtcccaagattcacccctcacttctccaccaaccagcgaccccacatcccaaccacccccgtccagacccctaaacaccccatcctcaaacctctcacggaggcggatctagggtgtcctctcctattaaaccgtttctgctgcagccctcggcgtccgggtgcagtgacttgggctgcgaacctgtactggttccgccgcacaatctggggagaagcggggctgagggcgcggagctgcccagagaggggcgccggggccggggccgcagtcgcagctcagggacgggacaggacgcccggggtcccggctgccggcccagccccaccctgcggccaaacggaccgaggaccgaggtgcgcagggggcgctcaggtcccagaccccaaagacgctgcggcgaggcccgggtcccgccacagccggttccgactggttccgaccagcccttcgccctgcctcaggacgccgggccccgcacactcaccatttcccggctgtgcggtgtcccgggtcctcccaactcccgtagtcagggtaggtcccagcgcgacaaaagccaccacagatgtcccagggcgtctctcagtgacagaatacggaacagaggtcaccagggtgaagaggccactagctcctggaacgtcacaccctcctctctgcctcgcgcctgattgacaattctcaggaacccgcccacgactttgattgggtagccctccaggtcccgcctcctgggcactgagtgacagaagaagcgatctcacagtgctgagtgcagccggatgaacaggttccagacccggcccctggcagggcgggcttcctccctgcgttgtgacccgacccgtcccgggaaacgtttgccttaaagcggaatttcctacctgtacgcagtgggccctttttgcttcttcctcctgaacaattgtgtgcaaggaatcccagactcactgtccagtggagccatcccttggcctcagagcaggagggcagccgaggccacacaggccacactgtagcagcgggggacagggggtgggtgggtgggggggtggtgctgatgtcctccagggaccaggaatttgggatgaggctgtcgcctgcaaggtcaagcctttcttccactataagcgctggatgggttctttctgcgcgctacgcaaataaagaccacggtattgcagttaaaaaaaaagtttaataaacactaggccagctacgatacgtgagagacggagttactactcaaattattctcatccaaggtcctctggtaggggtttttcaagggcagtttgggagaaagggtggaggtagctaggcttgctactgactggttggggtggggatgaaatcactggggatggaatctgtcctcttggcagtgcgtggtggctcaccgctgtaatcccaatactttgggaggcctaggtgggaggatcgcttgaggccagtagttcaagaccagcctggacatagagtgaaactccgtctctatactataagggaggagaccacccctcatattgtcttatgcccaatttctgcctccaaagaagaagtaaaaactaaaaggcagaaatgaaatccacaggcagataacccggcttgtgccctgggctgggtagttaaaaatcaacctctgacctaactgtgttatctatgattccagacattgtatggaaaagcactgtgaaaatccctgtcctgttctgttcagttctggttaccggtgcatgcagcccccagtcacgtacccactgtttgctccatcaatcacgaccctctcacgcggactcctagttgtaagcccttaaaagggacaagaattgctcactcggggagctcggtttttggagacgtgagtccgccgatgctcccagcccagctgaataaagccctttccttccacaactcggtgtctgaggggttcttgtctgcggcttgtactgctacatatttaaaaaagaaaaaaagaggccgggcccggtggctcacacctgtaatcccagaactttgggaggcccaggcgggcggatcacctgaggtcgggagtttgagaccagcctgaccaacatggagaaagctcgtctctactaaaaatacaaaattagctgggcgtggtggcacatgtctgtaatcccagctacctgggaggctaaggcgggagaatcacttgaacccgggaggtggaggttgcggtgagctgagatcgcgccaagccgagatcgtgcctttgcactccagcctgggcaacaagagcgaaactccgtctcaaaaaaaaacaaaaaaaagacaaaaaaaaaaaaaacctatcctgttatgctgaatcacttctggttggggccacaggagcagagttggcaggtgcaggtggtgtcagacatgcaaaaaaaaaacaaacaaacaaacaaaaactgaaaatacgtctacaaatgctaatctacaatagtggtgttatctgcagaaatagctggcaatctatgtctacactttagcagcattccgattcctttcatccctcagcctgatggccattcattcgttttacaaaggcagttgagttttggggaaggcttattatcatttaagctatcttccaaagttagctgtgcctaagagcccaggattaagggaaagagaagacagagggttggcaggggcggggggcggggcggggcagaacgggtgttggctcagatctcttccactgccataattttctcactgatataatttttttgcgatctattcattttcatcccagaaaataaaaacacatcaacaatgaaatgaaattgttaaatgtgtgaaaaaactggaattatagggcagcatggttgttttttttttgttttattttgttgtttttgtttttgttgttgttgtttttgagatagagtctcactctgttgcccaggcttgagtgtagtggcgcgatctcggcccactgcaacctccgactcccaggttcaagcgattctcctgcctcagcctcccgagtagctgagactacaggtgcacaccaccatgcccagctaatttttgtttttttagtagagatagtgtttcaccatgttggcctggctggtgttgaactccttacctcaggtttatttgcttgcctctgccttccaaagtgctgggattccaggcatgagccaccacacctggcctgacagcatgtattctattaaaggaatcagaagagaagaaaagaaaaaatatctcgttcagggaagtaagcaggaaaccccctttcaggaagttaaacagattcccgagcttgagagccagactcttgactcctgaaatggagccccagagtggatcagcacctgatgatgagggagagacattgaaggatttaactctgggagctcaacttgccctcctctgcacagtgtagaaacactctttccttcaagactttaaatgttaatgacttaaaagctccaatcggaagccgaaacattagggaatgaatttgaaaacatgagggtttccccatatttctatgaagcaaaagtagaaaacctaaaaccaccatgaactggaagctggaactaatggctaaaaaagaaaggagtcaaacatcaggtgtcattcgatgaaataaaatctttattcaatttgtaaaaatggtagtgtttccagacaggaaaaatgggcatgtttggaaaataaggaaaagaaatgatatctgattatagctaacaaataaatgatactcttgccttcaaaaatcacacaaagacacacacacacacacacacacacacagagagagagagagagagagagagagagaaagagagatatcctatcacctagcactttgggaggccgaggcaggcggatcacaagttcaggagttggagatcagcctggccagtatggtgaaactccgtctctactaaaaatacaaaaattagctgggcatggtggggcgcggtggctcacgcctgtaatcccagcactttgggaggccaaggcgggcagatcacgaggtcaggagattgagaccatcctggccaacacggggaaaccccatctctactaaaaatacaaaaaaattagccgggcgtggtggcgggcgcctgtagtcccagctactcgggaggctgaggcaggagaatggcgtgaacccaggaagcacagcttgcagtgagctgagatcatgccactgcactccagcctgggtgacagagcgagactccgtctcaaaaaaaaaaaaaaaaagaaatgcagaggatcaggtcttatccatgacctgcttaatgagaagctggatttgaaggtctgtagtttcctgtgaaagtttgagaagtgcatctgacagtgattagtgattcagcccaaagggtatttcatactcctcaccggtgagataattgaattcacagagtatctgaggtaggggagatccagtgggctgtgaggggctggggctggaactgaaagcaaagactggcgagacatcccgaagaagacaatgtgggccgggcgcggtggctcacacctgtaatcccagcactttggaaggctgaggtgggtggatcacaaggtcaggagttcgagaccaggctggccaacatggtgaaaccccgtctctactaaaaatacaaaaattagctgggcatggtggtgcgcacctgtagtcccagctactagggaggctgaggcaggagaatcgcttgtacctgggaggtggaggttgcactccagcctgggtgacagagcgagactccgtctcaaaaaaaaaaaaagaaaagaaaaaaaagaagacaatgtggatgaaagcgaggccactttaccaacactggtatggcctggctcgctgatcctcactatgggaacgaccactcatgataactgaccaggagtgtctgtgggccattgatcaccacactcaggccccagagcatgcgcactccaaccaatcctcgcaacttggaatgagagaaaataggcacacagagaagtgaggaaatggaggccctgtttgttgagctggggaggaatgggatatgatggaggtgaaatgtttctgctttccttgagggccaaaagacattataggccatgtgagacagagatgggccacactgttcagtttggcagggatattcagtacctgccatactgtcagtggaaagtcacaacaaataccaaaatgtcatctttcaaaggatccttgcttgcacaattttaaaaccaggccaggggtggtggctcatgcctgtaatcccagcactttgggaggctgagtcgggtggatcacctgaggtcaggagctccagaccagcctggccaacgtggtgaaacccagtctctactaaaagtacaaaaattagctgggcgtggtggcacacgcctgaagtcccagctactcaggaggctgaggcaggagagtcgcttgaacctgggaggcagaggttgcagtgagccgagatcatgccactgcacacaagcctgggtgataaagagagactctgtctcaaaaacaaaacaaaacaaaaaacccgtatgaaaactaaacctggctgggcgcggtggttcatgcctgtaatcccagcactttgggaggccgaggcggacggatcgcgaggtctggagatcgagaccatcctggctaacatgatgaaaccccgtctctactaaaaatacaaaaaattagccaggcattgtggcgggtgcctgtagtcccagctactggggaggctgaggcaggagaatggcgtgaacccgggaggtggagcttgcagtgagccaagatcatgccactgcattccagcctgggcgacacagcaacactccgtctcaaaaaagaaaaaaaaaaattctgtctggctggactcggtggctcatgcctgtaatcctagcactttgggaggtctaggtaggcggatcacctgaggttaggagtttgagaccaggctgaccaacatggagaaacctcgtctctactaaaaatacaaaattagccggtcgtggtggcacatgcctgtaatcccagctactcaggaggctgaggcaggagaatcgcttgaacctgggaggcggaggttgtggtgagccaagattgcaccattgcaccattgcacaccagcctgggcaacaagagcgaaactctgtctcaaaaaaaaaaaaaatctgtctatattttcaataagcaggtagtgtgacaggttaaggaggacagaaaaaaataaaaatggatgcggaacttacccatgatatcacagccttacgctggaagatggtggtttctttttcttctttctctttttttttttttttgagacacggtctcattcccacacctaggctggagtgcagtggtatgatcctggctcactgcggccttgacctctggagcacaggtgatcctcccacttcagcctcctgagtagctgggactataggtgcctgtcaccacacccagctactttttgtattttttgtagagccagggttttgccacgttacccaggctgtcaggctggtctcaaactcctggactcaagggatccacccacctcggcctcccaaagtgctgggattacgggcatgaaccaccacgcctagactggaagatggtttcttttttttttttttttgagatggagtctcgctctgtcacccaggctggagtgcagtggcgcgatctcagctcactgcacactccgcctcccaggttcacaccattctcctgcctcagcctcccgaataaaataaaataaaataaagtaaaataaaataaaataaaataaaataaaataaaataaaataaaataaaataaaataaaataaaatgaataaaataaaataaaatactggaggtctcagcacaaccctgagaaatccacaccctagaaacaatgtgtgaatgttaatgccacccttactacaacatggaactttttatttttcttactggaaaatggctaaaaacagtttattggaggactttatttttaaagagttggggtctcactctgtggcccaggctggagtgcagttgtgtgatcataccttaccgtaacctgaaactcctgggctcaagtgatttttcccaactcagcctcccaaacagctggaggacttttatacaggagaatatagatagaagtaaaggaaactcagtttggtttcatttatataatttaacttttcctaggttaagaaagcaataaagtctataaaccttaaatggatttccctgaatatgaaaagtgcaagaaataaattctacaaatggaaagacgtaggagtaattgaagtggtacgaagaagtctccttgagaaggtgacatttaatgtgagacctgaaatgtatattagtgtaaaaactcagggcacagccggggagggtggctcacacctgtaatcccagcactttgagatgctgagacaggaggatcactggaggccaggagtttgagaccaccctgggtaacatagcaaaacaacttctctacaaaataatgaaaaaattaggtaggcaaagcaacacaagcctgggcatgatagtcacagatcaggaggctaacgtggttagaatgtttgcacccagaaggtcaaggctgcagggagccatcatcaggccactgcactccatcctgggcaacagagccagaaacggtctcaaaacaaaaacaaaaacagtcaaccaagaagtcaatatctggcaacagtgtctttcaaaagtgaggaagaggcagggcacggtggctcacagctgtaatcccgacactttgggaggctgaggctggcggatcacctgaggtcaggagtttgaaaccagcctggccaccatggtgaaaccccatctctactaaaaatacaaaaattaggcaggcatggtggcgcacacctgtattctcagctactcagggggctaaggcaagagaatagcttgaacccgggaggcaggggtttctgtgagccgagattacgccactgtacttcagcctgggcgacaaagggagactccatttcagaaaaaaaaaaaaaaaaaaaaaaaacaggaagaaattaagaaattttcacataaacaaaaactgaagtagttttttttgttgttgtttttttaaattttgttttgttttttcaatcattagaggtgttctgcatgaaatgcaaagggtgccctggagggtgaaattgaagtacactagacagtattgggaggccttatgtgaaaataaaaatctcagtaaaaacaaatacatggacaatgataaaagctagtattattgtacaataattttgaacttcaggttttgttttctacataacttaagagcctaatgtatataaaatatatttgtctaaaagtgaatattattttaagttggacttggaactccatattttttatatagtttaagagacatggccaggcatggtagctcacgcctgtaatcccggcactttgggagaccgaggcaggtggatcacctgaggtcacgagttcgagaccagcctgaccaatatggtgaaaccctgtctgtactaaaaatacaaaaattagctgggcgtggtggcaggcgcctgtaatcccagctacttgggaggctgaggcagaagaattgcttgaacccgggaggcagaggtggcagtgagccgagattgtaccactgcactccagtctggatgacagagcaggactccatctcaaaaaaagaaaaaaggaacaaatgcattaaaaatatcctttttttgacacacaaagtagaaggatgcaaatttatgacatcaacttaaaagaggtgtgaatgaacctataatggtgtagcattttggtatgttattgaagttaaattggcatcaatttagagtgttgtaactttaggatagtaaatgtaatctccatggcaattataaacaatacagcaagagcatatacacaaaacaaaataagaaggaaatttaaatgtttcactacaaaaagcaactaaaagcaaaagaacacagtaatacaggaaatgagggacaaaaaagctataaggaatacagaaaacaaacagcagaatgccggaagatcctccttatcagaaattactttaaatgttaatgcattaaactcttcaatcaaaagataagacatctgacttttaatttgaaaacatgaggatttccccatatttttataaagtggaagtaccagatataaaagcattatgaactggaagctggaacccacggctaagaagaaaggagccaaacatcagatgtcattagatgaaacaaaatctttagtcaacttgtaaaaactgtaatgttttctgccgcgacatgtgggcatgttaggaaaataagaaaaaaaaatgatgtctgagtataactaatgaataaatgatactatttccttagggaactacacacagacacagacacagacacacacacacacacacacacacacacacacacacacacacacaaacacacacagtctaagatcacaggacattgttccttccctgaaaaataaactactgctctgtaagatgctccactcctcactcctcacattaactgctcctggaataatgtcatattttgttgtttgcagataggcattaaaagagggtgtagcgggctgggcgcggtggctcatgcctgtaatccaagcactttgggaggccgaggagggcggatcacgaggtcaggagatcaagaccatcctggctaacatggtgaaactctgtctctctaaaaatacaaaaaattagccgggcatggtggtgggcgcctgtagtcccagctactcgggaggctgaggcaggagaatggcatgaacccaggaagcggagcttgcagtgagccgagatggcgccactgcactccagcctgggcaacagagcgagactccatctcaaaaaaaaaaaaaaggcgggtgtagggccaggcgcagtggctcacccctgtaatcccagcactttgggaggccaaggtgggtggatcacgagatcaagagatcgagacatggtgaaaccccatctctactaaaaatacaaaaattacctgggcatggtggcgcatgcctgtagtcccagctactagggaggctaaggcaggagaattgcttgaacccgggaggcagaggctgcagtgagccgagattgcaccattgcactccagcctggcgacagagtgagactccatctcaggccgggtgtggtggctcatgcctataatcccagcactttgggaggccaaggcaggcggatcacgaggtcaggagttcaagaccagcctggccaacatggagaaaccccatctctactaaaaatacaaaaatttgccgggcatagtggtgcatacctgtaatcccagctactcgggaggctgaggcaggagaatcgcttgaacccaggaggcggaggttgcagtgagccgagatcgcgccatggcactcaagcctgagcaacagagcaagactccatctcaaaaagaaaaaaagaaaaaaagaaaaagaagggggtgtagtgtgtcgaactaagtgggtgtcaggggttcacttacagactttgtatgtttttacaaactgcagcaattaagtcgtcaattaccgtgttgatttaaatacatataaaaactttcagacaaaaatagacgttcacattaccatgatgaaaaaagtcagtaatggtgattcctctgtgaaactagaaaagaaatccagtggttaaacttggcagctccaagggtatcactgccccctaggacagtggtccccaacctttttggtagcagggagcagtttcatggaagacaacttttccacagactgcgggggaggggtgcggttttgggaggattcagctgcattaaatctattgtgcactttatttctattattattacattgtaatatatgatgaaataattatacaactcaccataatgtagaatcagtgagagccctgagcttgttttcctacaactagatggtctcatctggaggtgacgggagacactgacagatcatcaggcattagattctcataaggggcgtgcaacctaaatccctcacatgcacagttcacaacagggttcgtgctcctatgagaatctaatgctactgctgatgtgacaggaggcagagttccggcagtaacgtgagtggcccagttcctaacaggccatggacctattactgatccgttgcccaggggttagggacccctgccctaggcaacatcttgaagatctatttgaaatacacttcttgacttttcttttttctttttgagacagagtcttgctgtgctgcccaggctggagtgtagtggtgcgatctcagctcattgcaccctctgcctcctgggttcaagagattctcccacctcagcctcttgagtagctgggattacaggcatgcgccaccacactggctaattttttgtatttttagaagagatgaggttttgccacgttggccaggctggtctcaaactcctggcctcaagcgatctgcccgcctcagcctcccaaagtgctgggactacaggtatgaggcaccgtgcccagcctgaaatacatttcaatacaagttattcccctgaataaagaatcagctcttatcaaagcctaaagtgatcaaatgcttgccaaaagctgccgttgatccgggtttttttctgtttttttttttttttttttttttttgagagaagtctcactcttatcccccaggtttgagtgcaatggctcgatcttggctcactgcaacctctgcctcctgggttcaaatgattctcctgcctctgcctcccaagtaactgggattaagtcgcctgccaccacacctggctaatttttgtatattttagtagagatggggtttcaccatgttggccaggctggttttgaactcctgaccacaagtgatctgcccgcctcggcctcacaaaatgctgggattacaggcatgagccactgcgcccgtcaatccagttttgtttcattcaaactctctgtggcctgtgacataggtgaccactctcccatcttgaaataccttctcctggaggattccaggaagggacacccaattcattctcctcctaagtcactggcctgcccagtctcttgcaggctgctcctcctgctaacctcagaggtggacagccattggtctcctcctgagcacttgtcttctgctacactttgccccttaccctgaaacaaggtggcttctgctggacccagggcatcaaatagcatccatatgataatgttttccaaatttcatttagatctttctctcaggctccagatccaataccctggtcaacacttcgcttgtttgactcaaacatgccatgagtgattacaaaacataacccttcatttcccctccaatcatctcccctggccttggtcctctgagtgaggggaagcacccaggggctctgaaaataggattcatccttgcctctcttctctccttcactccatcagaaatcctacgggagctgcccctgcctgtgtaactcctagtcaaccttcaggaatttttttttgttttttttgagacgagtcttgctctgtcgcccaggctggagtccagtggcgtgatctcggctcactgcaacctctgcctcccagattcaagcaattctcctgcctcagcctcccatgtagctgggattacaagcatgtgccaccatacctggctaatttttgtgttttttagtagaggcagagtttcaccatgttggccaggttggtctagtctggaattcctgacctcaagtgatcagcccacctcagcctccaaaagtgttggaattacaggcgtaagccactgcgcctggccaccttcaggctttgagaattagtctcactggggaagcctcccttagtctctcagactagtgtgagaaccctctccaccatcatattttagagccacacactcttctctactgcgctgaagacgatcaccactgatcctttgtttatgtccagaactgctaaacagtgggattgatggggcctttccccaccctggaacccggctccaaaaacacagcttgggttcataactagacttctcaatacacaaccttctgtcgatatccactaatattacccaaacccacgccagcacagcctctcttcaaactacaactatggcttttaagctggtctcccaggtcccctctaccatctattctctgcccaccagcaggagtaagcttcttcaaacacaaaccaaacatcacttctctgctcaaaatcccataaacggccgggcgcgatggctcacgcctataatcccagcactttaggaggccaaggttggtggatcacaaggtcaggagtttgagaccagcctggccaatatggtaaaaccccgtctctaccaaaaatacaaaaattagctgggcatggtggcaggcacctgtagtcccagctactcgggaaactaaagcaggagaatcacttgaacccgggaggcagaggttgcagtgagccgagatcgtgccattgtactccagcctggacgacagagcaagactctgtctcaaaaaaaaaaaaaaactataaaagtgtaacctatctttaaaagcgtaacttatcctataaaagtgtaactttactgcctatctaaccacgtcttttattacctgagcactctatgttccatggaccaacacgatgacacgtgggagcgagttagaaacgtggactctcacactctgtccctaatctgctgagccagaagctgaatttgaggatctatagttccccgtgaaatttcagaagtgcgtcttacaagtttcccccttaacctgacccagccataagggtattgcatattcctcaccactagggtatttgaattaacagaacatctcaggtgggggcagcaaggggctggggctggggctggaactgggagaggagacaagtgagacatccttaagaagatgatgtggcgagggcgaggccgccttcccagcactgctatgtcctggcccactgctcttgaagtgcaggaatggccactcacgggaactgatcaggaggatgcatgtgtgctcagcaatgtgctgaggctgtagcgcttgcacatggccacccatgtgctcagtctgggagtttggtattcagggaagcgtgtgcaccagcaggcagcaaaagtatgtgggtcctccttgccagccagcccatactgctcggggatgggctgaaagtgatggagaagaagggttttctttgctccaagaggccagtggtaaagtcacaacaaacaccaaaatgtcatgtttcataagctctttagctatacagcaattttaaaaccatctaagaattaaacatatttctgggcacagtggctcacacttgcaatcccagcactttcagaggcttaggttggaggatcgcttgaggccaggagctagaggccagcttgggcaacaaagtgaggcccccatctctaaaaaaaaaaaaaaaaaaaaatatatatatatatatatatatatacacacacacacatatatatacacatatatatgtatgtgtatatatatatgtatatatatatgtatgtgtgtgtatatatatatacacgtatatatatattagcaaggcgtggcagggtgtgcctctagttccagttacttgggaggctgaggcaagaggatgccctgagcccaggttcgaggttacagtgagctatgatcatgccactgtactctatcctggtgagacaaaatgagaccctatctctaaacagaaaaataaaagaagaggcaattaaacctaagtgtctattagaaatacacttcaatgctgggcacggtggctcacgcctgtaatcccaacagtttgggaggccgaagcgggtggatcacccgaggtcacgagtttaagaccagcctggccaacatggtgaaatcttgtctctactaaaaatacaaaaatgagctgggcatggtggcgggcacctgtaatcccagctactcaggaggctgaggcaggagaatcgcttgaacccgggaggcagaggtttcagtgagccgagatcacgccactgccctccagcctgggcaacagagtgagactctgtctcaaaaaaaaaagaaaagaaaaagaaagaaatatacttcaagcaactcaagaatcccagagaatacaaaatggaaagaaattttattaactgcttctattaagaaaacactattcgacttatgaacctttatgtgaagaaaacttgcaaaaatatctcacatcaatttttgtatgaaagtaagaagtaggattcatagtgtagattcatgttaagaatgaggcactggtaaagagaaagagaatagagttatacgttttcatttctttcctattgcaaattctctggagcattatacatgtcttaattttaatcagattttcctaaattacttacatttatagcatttctagacagcaggggttgggatgaagaaacttcaatccagcaaagtttgtatatatacattcatggaggtgacatttaagtcatttcattaggaaactctttattttttattttttatttttttgagacggagtgttgctctgtcacccaggctagagtgcagtggcactatctcggctcaccacaatctccgcctcccgagttcaagcaattctcctgcctcagtctcccgagtaacctcctgagtacaggcacccgctactccgcccggctaatttttgtatttttagtagagacggggtttcaccatgttggccaggctggtctcgaactcctgacctcgtgatctacccacctcggcctcccaaagtgctgagattacaggcgttagccactgtgcctggcccattaggaaactcttaaagttgtctgcagatagatactgcacatggaattagtcctagtccttggaaagttatatgattttaattcaatagtgtatattactgtgaataccgtatatgtttcatctctaagcaggaaattgaatccattaacagtgttaatagttttgggttttttttttttttttagacagggtctcactctgtcactcaggctagagtgcagtggtgcaatcttggctcactgcagcatcgacttcccaggctcaagcaatccttccatctcagcctcctgagtagctgggactacaggaacacaccaccagacctgggtaattttttgtattttttgtagagatgaggtttcgccatgttgcccaggctggtctcgaactcctgggctcaagcgatccatccacctcagcctcccaaagtgctgggatgacaggcatgagccaccacacctggccaacagtgttaatagttttccagttgttttgtctttagtttcccaagcaatgaatgctattatggtcaaacatcatacttgcttcttccatccctttcaacatattgatcattgctttttttttgatattaagtaatagaggttattgtaataagtgattggagtgaaacagacatatttgcttttgctaggttctgttcctcctttcactgggaagcccctcacccagtccctcatcatgctctgctccaaaacacaccttaaccagaatccaacaatgttcatgttcaaaatgaaagacaaaacaaatattttcctaggcttaaaaatatgaacattgagagaatttttcctggcacaccagccctacaagaccaaagttgccaggtgcggtggctcgcgtctgtaatctcagcactttgggaggccgaggctggtggatcactagaggtcaggagtttgagagcagcctggcaaacatggcaaaaccctgtctctacaaaaaaaaaaaaaaatacaaaaattagctgggtgtggtggcacacgcctgtagtcccagctacttggggggctgaggcaggacaatcatttgaacccggcaggtggaggttgcagtggccaagatagagccactgcactccagcctgggacaatagaggaagactccatctcaaaaaaaaaaaaattattgagtctgtcaaaatccacaggaaaaagcagagagcaccatgcaagactatataagtggaaaagacaaactgaatatgtgtttcttcacctttctccttgttatggatttacaagtcaattgtgtaaagtaataagtagtaatggattgttaggcctacaacatagaaaaatttaacatacatgtattatatttataaataacaccataaaaactgaactaaatgactaccagtggaaaagtaataattataagaatatattgttgaatgtggaacactgagttgttacatatgcaacaaagtaccccagaaaggcaaaaacataatagagctatagaggacaaatatgtgtgtacatcactgaaatttaaccacatattactggagaactgagcctgattttgataaactaacatttacatgacaaacactagagtaatcactacaaaatcttagaacaaatgtaatgaaaaataaatcatcctacattggaaagatatactgggtgaaggcagaatttactgtgcttccttaattaaaaattgacttgggccaggcgcagtggctcacgcctgtaatcccagcactttgggaggccaaggtgggcggatcatctgaggtcaggagtttgagaccagcttagccgacatggtgaaaccccgtttctactaaaaaaaatacaaaaattagctgggcatggtggcatgcgcctgtaatcccagctactcaggaggctgaggcaggagaaatgcttgaacccgggaggcagaggttgcagtgagtcgagatcacgccactgcactccagcctgagcaacaagagttaaactccgtttcaaaaacaaacaaacaaaaaattgactctacattcattccttctaacctctaacacaggtaaaacctctaacacaggtaaaacctctaacacaggtacattcattccataacatatggggagaagatttccctcattcatctaacgtggaaatttccatgttatatatttccacttcaaccttgactctactactaaaatcaggaaattcttgtgcatgtcatgatctctttctatccatttcttcaacctctaacacaggtacagaattacaggttaatcatctctttttctgcattgcattttctcaattttctattattagggagatcttttccactttattatttttagtttgtgctacttaactttctcatattttggaagattagtcaggaacaaaacttttaagtggctcaattatgtgtttgttttgttttgtttgtttgtttttgaaacagggtctcattctctcacccaggctagagtgcagtgaaacaatctcagctcactgcagcctccacctcctgggctcaaacgattctcatgccttagcctcctgagcagctgggaccacaggcatgcgccaccacgccctgctttttcttttttttttctttgagacggagtctcactctgtcgcccaggctggagtgcagtggcacgatctcggctcactgcaagctctgcctcccgggttcacgccattctcgtctcagcctcctgagtagctgggactacaggcgcccaccaccatgcccggctaattttttgtattttttttagtggagatggggtttcaccgtgttggccaggatggtctcgatctcctgacctcgtgatctgcccgcctcggcctcccaaagtgctgggattacaggcgtgagacaccacacccggccttttttttttttttttttttttgagatagagtctcgctctgtcacccagactggagtgcagtggcgcgatctcagctcactgcaagttctgcctcccgggttcaagggattctcctgcctcagcctcctgagtagctgggattataggcacctgccaccacacctggctaatttttggatttttactagacagggtttcgccatgttggccaggctggtctcgaactcctgacctcgtgatctgcccgcctcagcctcccaaagtgctgggattacaggcgagagccactgcgcccaggcttttgttgttgttgttgttttggtagagacaggctttcaccatgttgcccacgctggtcttgaactcatgaactcaagcgatccacccggcttggcctcccaaagtgttgggattacaggcgtgggccaccgccttgcctggcctcaattatgtttatgaatgttgtgaagtagaaattaatattaccccttcaaataaacaggaaggtgttagcataccacacgggtccaaagtgagtatggttcagattgggaacaaagctgtgtggcagtagctgacctaagcctgggatcaaatctaaaggttgcctgagagaaacagggactgcgtaggaacaggtcttccatgaacacaggaaaatgaacaaacttagtgctgcagacaaggaggaatgtggcccagcgctgcttggtaagttcatggtccaagggagtctttgcacttctgtggcttttttttttttttttttgagacggagtctcacccctgtcgcccaggctggagtgcagtggcaggatcttggctcactgcaagctctgcctcctgggttcacgccattctcctgcctcagcctctctagtagctgggactacatgcacctgccaccacgcccggctaattttttgtattcttttagtagagacgggtttcaccatgttagccaggatggtctcgatctcctgacctcgtgatccgcatgcctcggcctcccgaagtgctgggattacaggcgtgagccaccgcacccggcccacttctgtggcttcccccccccgccattttctcatggtgccaaaattcacataagatagaatttaccttggctgggcacggtgactcacacctgtaatcccagcactttgggaggccaaggcgggaggatcacggggttcgagaccaacctgaccaatatggagaaaccctgtctctactaaaaatacaaaattagctgggtgtggtggcacatgcctgtaatcccagctactcaggaggctgaggaagaagaaatcacttgaacctgggaggcagagattgtggtgagccaagatagcgccattgcactccagcctgggcaacaagagcaaaactccatctcaaaaaaaaaaaaaaagatctacaggaaggagtttcaggccagcaaggtctggcttagctagctacacaatgcattagagcttcaagaacttgaagaacatgggagaattggccttggctgatgcaaaggaaacatcagcattcctagaaaagctcatgaaactcattaaaaaaaaaaaaaaaaaagaggctaacttccagagcaaatcctccattgtaatgaatcaggcatgttctggaagaggatgcccaattgtaccttcatcacaagagtacaaagaaagccttggggttcatgacttggaaagattgccttactctggtgctacgtggcaatgcagcaggtcataagatcaaacaaagcctcctctactaagtaaacaatccgtgggtccttgaaaacaaaagcgaaacttgcctgcccgtgtcctgacaaaaacacacgaggacttggttctaccactgcttcattcctgatgtgaatgaataccttgaaaagaaggggctgccactcaaggccctcctcataactgacaacgctcctggcatctctcttctctctgttatgccgataaaaatggggaagtgatgttcctgcctcctaaaactacatcactgctacaactacttgatcaaagcatcatcaagtgcctcaaggtgtcttacacccactggacttttggaaggatttatgctgtcttgataataaccctcaccatgtcatacaggatttatggaagagcttcccaactgcagaaacgattgtgtttattgcggaggctgtaaatgccctacagctcaagacagccaaagtgtgttggaagccattatggagtgaggaagtcaatgatttcaggcgcttctgcactatcgatatgatagtcagaaatatcttaaatgtaaggaaagttggtggggaaggctatctctgacacaagtgaagacaatgttgaggaacacacagaagagcaaagaagaaacctttactaacaaggaactagaagatatgctgaaatcctctatagatgatgatgatgatgatgtagatttagaagaggcagtgccgccaggcgtggtggctcacgcctgtaatcccaacagtttgggaggccgaagcgggtgaatcacctgaggtcacgagtttaagaccagcctggccaacatggtgaaaccccgtctctactaaaaatacaaaaattagctgggtgtggtggcgggcacctgtaatcccagctacttgggaggctgaggcatgagaatcgcttgaacccaggaggcagtgtttgcagtgagccgagatcgtgccactgcactccagcctgggtgacagagtgagactcagtctcaataaataaataaagaggcagtgccataagtggtggctcatgcctgtaatcccagcattctgagaggccaaggcaggcagatcacttgaagtcacagggagttcaaaaccagcttggcaaacatggcgaaaccctgtctctactaaaaatacaaaaattagctgggcatggtggtgcatgcctgtattcccagctacttgggtggctgaggcaggaggatcacttgaacttgggaggtggaggttgcagtgagctgagattgtaatcccagctcctcaggtggctgatgcaggaggatcacttgaacctgggaggtggaggctgcagtgagctgagattgcaccactgcacttcagcctcagcgacagagtgagactctgtctgaaaaaaaaaaaaagaagcagtgctatagattttgatacttgaaaaatctgaaggctgggtgtggtggctcaccctgtaatcctagtaatttgggaggccaaggcaggcagatctcttgattccaggagttcaagaccagcctgggaaacatggtgaaaccttgtctccacaaaaaacacaaaaagtagccaggcatcgtgatgtgtgcctataatcccagctacttgggaggctgaggtgggaagatcacttgagcccaggaagttgaggctgcagtgagccatgcactgtagggtgacagagtgagatcttgtcttaaaaaaaaaaaaaaagaaaagaaaaagaaaaaaaaagaaaaattggaagcagttttagggcacctacagcttctacaaggcgcaagtgttaaagattatcatcctcaattaagattcttccatggaacaaagcctccatgtcaccccagagattacatgctcacaaacgttgcaaagtttaaaaaaaaaaaaactagcttcctacaatgtttctaattaaatatctgcaaatatgaagacagccttcaatgcttaaagatcttcagtcctcaaattgaacagattctgacattagtattatttagactgctccaaaaattcagtatctgcagtcagaatctgtttcttccaatatagttgatcatgttgacatcctgtcaagattcgagttagcctgaggtctcactgcttatctgtggtgtcacacatctagctgactcaacacatcacaacattaggcacgatattgcaataatcatcattacacttttgttgggtgaatgttaacacattttcaggtcattaaacaaaagcaatctatgagtgttgaaagaaaagatttataatgctctaggtgacatgtattatgtgggtgggtctgtactgaatatgtgtagggtctttctcatatcatgattcactaaacaatataataacaactatttacatagcttctatgatgcatgatgtattttaactaatctacagatgatttagagtatacaggaggatgtgggtaggttacatgcaaatattttttattgttattatttttttgagacagggtctcattctgttgcccatgctagaatgcagtgatgtgattttgactcaccgcaacctcaacctcccaggctcaagcgatcctcccacctcagcttccctagtagctgggactacaggtacatgtcaccacacctggctaatttgtgtatcttctgtagagacagggttttgccacattacccaggctggcctctaactcctgggctcaagtgatccacctgtcttgggctcctaaggtgctaggattacagaggtgagcaactgtgtctaacccaaatatgtcttttctttctttcctttttttttttttttgtgtgtgtgacagaggttgttttgctcttgctgcccaggctggagtgcagtggcgcgatcttggctcaccgcaacctccgcctcccggattcaagtgattatcctgcctcagcctcctgagtagctgggattacaggcatgtgccatcacatccgggtaattttgtaccaaatatgtcatttttaaaaaaggacttggcatgtgtcgatttatgtatgcccagggggtggtagaaccacgctcctgcaaatattaggggataactgtatttgaaagaaactgaggcttaaaattaaggctttactatgtgtttacattcatagggtttatctccaatgagaattatttctatctgaaatgaaataacattaaagaatacttccctacatttcacacatttatagagtatctctccagtgagtccttttatgtctatgcaaggacctgagagaactcaatgcttttctacatttcttacattcatatgacttctctccagagtgaatcctttcatgtactttttttttttttttgagacagggtctggctctgtcgcccaggctggggtgcagtgcatcttggctcactgcaacccccaccccttgggctcaagagatcttcccacctcagcctcccaagtagctgggactacaggggcataccaccacacctgctactttttctattttttgtagagacatggtttcaccattttgcccaggcaggcctcaaattcctgaggtcaagcaatttgcccaccctaagtgctgggattacaggcgtgagccactgtgcccagcctcatgtacttttaagttaccaaaatgactgaaggcttccctacatattttacactcacagagtttttctgctctgtgagttgttttatgttgacaatggtgttaaaaaaaaatcgatcactttcccacattccttatatcatacagcatctctccagtgtgagatatttcatgattttgaaaggaataaaaattatgaaaggctttcccacatttacatttatagggtttctgtccagtgtaagtttattcatgatatcaaagggaactggaaatatagaaggctttataatagtttacattcatattgtttctctccagtgagtcttttcatgtctttgacatacactgggataaacaaaggctttcccacataccttgcatttattcggcccatctcccgtatgcattaccatatgtcttcgaaagcttgagctatgagataacgctttcccacactgcttgcattcatagggtttctctccactgtgagacttttcgtgtctttgacatacactaggataaacaaaagctttcccacatatcttgcatttatgaggtccacctccagtgtgcattatcatgtgtcttcgaaagcttgagctatgagataacgttttcccacactgcttgcattcatagggtttctctccagtgtgaattcgttcatgatatcgaactaaactgggacgatcaaagcctttcccacatatcttacatttatgaggtcgatctccagtgtgccttttcatgtgtatctgaaagcttccaagatgatgaaatgttttcccgcattgcttacactcatagggtttctctgcactgtgagtggtttcatgtcttcgaagggaactggaaacactgaaggctttcccacactgtttacatgtatatggtttctctccagtgtgagttctttcatgtcttatataggaactggaatcaggcaaggctttagaacactgcttacattcatacggtttctccccagtgtgcattctctcatgtcttcgataggaactgtaaaaaggaaaggctttagaacactgcttacattcatacggtttctctccagtgtgagttctttcatgcatacgtaataaactgggccaaaaaaaagctttcccacacaacttacatttataaggtctatttccaccttgcactaccatgtgtcttcgaaggtttctacgagaactgaaggtttttccacattccttacactcatagcgtttctttccagtgtgaggccttccacgcgactgaaaggagtgatggtaactgaaggctttcccacgttgtttatgtgtatgtggcttctctccatattcctgatactcatgtggtttgtgtccagaatcaactctgatgtggctattaagggataaatgacccattatgacttcttcacactcagcgctttgacatggatcttctccaggacaaatgctgttgttcacaatactatctcgaatgaggctaaatgtttctccacactgactactgtctttactttcactgaatctctctaccatatgacatctgtaaaaaatgagtagtacgttactaaatagttgtttctaaatgattatttatttatgtgtattaataggtattggatgtacttttttttttttttccctgagatggagtcttgctctgtcacccaggctagagtgcagcggcacgatctcggctcactgcaatctcttcctcccgggttcaagcgattctcctgcctcagcctcccaagtagccgggattagagaggcatacgccaccacgcccagctaattttgtatttctagtagagacagggttttgccatgctggccaggctgttctcgaacttctgacctcgtgatccacccccccttggcctcccaaagtgctgggattacagaagtgagtcactgcgcctggccagatatacctttttatcattaccatgcaaagtgtaggcttcatgccctgtttgaacatgaatgaactgaatgctatgcaagacaacccaacaccagctgggttttttttttttccttttctttttaattaattaatttattttttgaaacagtatcttgctttgtcaccaggctggagtgcagtagcagaacgatggttcatgcaaccttgacctcctgaactcaagtgatctacctacttcagcctcatgagtagctggaaccataggtgtgcaccaacacacttggctaattttttttttgagacggagtcttgctctgtcgccaggctggagtgcagtggcgcaatctcggctcactgcaaccttcgcctcctgggttcatgcaattctcctgccttggcctcccaagcagctggggttacaggtgcatacccccatgcccagctaacttttgtacttttgtagagacagggtttcactatgttggccaggctggtctcaaactcctgacctcaagtaatctgcctgcctcaacctcccaaagtgctgggattacaggcatgagccaccatgtccagcctcatatgtaaattcttataaaatgttttaggaggaaattttttaagaataaataaatttaggctggtgcagtgactcacacctgtaatcccagcatttggggaggccaaggcaggcagattgcttgagcccaggaattcaagaccagcctgggaaacatgccaaaaccctgtctctacaaaaaatacaaaaattaacgaggtgtggtggcttgcacgtgtagtcctggctactcaggaggctctggtgggagggtcacatgaacctgggaggtcgagtcttcagtgagccaagatcatgccactgcactccagcctgggcaacagagcaaggccctgactaaaaaaaaaagttaatttaaaaaattaaaaaataaatttaagctggacttgttcattttctttgtttttaaaatttccttttactctgagaatcacttcagaaacataactttctcctgtgagtgcaaattaccttagatttctcctaggatttttgtactgatcttcagtattctgttcttcccatatcattcctaaaagggagacccagaaaatcactatacattattagaaaattatataaaacagtaagattttatgtatactgcaatcatacatgattcgttcatcaaactacagttaattctgtacagtttgggggtggaggcagagtctcactctgttgcccaggctggagtgcagtggcacgatctcggctcacagcaacctccgcctcctgggttcaagcgattctcctgcctcagccttccgagtagctgggactacagatgcgtgccaccacaaccagctaatgtttgtatttttattggagacggggtttcaccatgttggtcaggctggtctcaaactcctgacctcaagtgatcttcccacctcagcctcccaaaatgctgggattacaggcatgagccaccatacccggccttacagttgattcttgaacaacacatgtttgaactgcacagctccacctacatatgaattttcttcagtctctgctacccctaagacaccaagatcaatccctcctcttacttagccttctcaatgtaaagataaggataaagaccttttaatcatacacttaatgaatagtaaatatagtttctcttctttatgattttcctatcaatattttctttctctagttcactttattgtgagaatatagtatgtaatacatgacttacaatatgtggattaatatggattaatcaacttttttttattattttattttattttatttttttgagacagattctcgctctgtcacccaggttggagtgcagtggcgtgatcttggctcactgcgacctctgcctcctgggctcaagtgattctgctaccttagcctcctgagtacctaggattacaggcatgcgccaccacgcctggctaatttttgtatttttagtagagatggggtttcaccacgttggtcaggctggtctcgaactcctgacctcatgatccgcccaccttggcctcccaacatgctgggattacaggtgtgagccaccgtgcccagccagtcaactgtttatgttaccagtaaggctgctggtcaatggcggcttaagctatggtggacaaaaagttagatgaggatgtacaacttctttcagggctgtcacctctgaattctgtgttgttcaagagtccatcatatgccctttccatatttcaaatcattgaacagcactgatgaccatgaaacaaatgtctgtaattgattaagtgaagacatggtatcatccttacttatacagtccaggttcctgatggtttcttgcatcacatatctgtataaattcttctgtgatggacccagcaaagcccattcctcctgggtgaagttcacagccacatcctcaaaggccactgcgtcctgaaacatcccacatagatagaggagaaaggttgagtgacagtactgaaaaaactatactcagttcataaacttcatatgatgctgtgctttccaagcatttattcaatgatgtagtaaactctctcatattctctttacactcactttctctcacacagccattttgatggtagaattcaacatgtttggtaaagttacagttgaataggaacaggtctcttcttggtgagttaaatgagtcttattgcctgcatcaccctaatgtctatttctgtagtaggttgtagttcttgtcaaagtcctactgacaaagtcctactacctattgtgcagaagagagctaccattagcagtcctgagactgcatgtccttacaaattcttattctcaaagttggaccttttatggtgtctaggaactggatttagggagtgccccaccaatgtaactaataacagagctcgattgtatctaaactgtttgtgcaaaaagtacattattttcttaactcctatgttctgagagtttagaatcttacaaactcagcagagggagtgtatgtgatcagccactgctgagtttgaatggttgtcccctccaaaacacatgttgaaagttaatccgcaaagtgggagtaataaaaggtggggattgaaaaggtgattgagtcttgaaggttcagagctcatgaatagattaatgtatacatggatcaatggcttaatgaataaataagttatctcaggaaggggactggtgtccttataagatggaagagacccgagttaggcactccggcccttgccatgtaatgctttatgccatctaagaactctgcagagtccccaccagcaagaaggttctcaccagatgcccagccttaaccttggacttcccagcctccagaacagtaaaaaacaaatattgttccttataaattatccaggttcagattattcttaagcaacaaaaaacagactaagccagccaccaaaaaacactataggcactgggtctctaatgagagaccctggtagataaaatttcacatgtttttttgcaactgattagttggaggattcggcacatcctctgggattatactaacagaaaatctggaagctggtaactggtttcctctagaccaaatgtagttaagcatgacaaataaataataaaagatatttcaccatcccaatggaaaatttttgaacatcttattgggtaatgtcaaaggagaaggaaagaaggtcaatgagagaatgtaatattagaaaagaactcaatgttatctcttatgaatatttataaaattccctaaataactaaaacagacctaaataaccaaaaatttcactaccagctaggtaccatggctcatgcctgtaatctcagtactttgagaggccagggcagatggaccatttgagcccaggagtttgagaccagcctgggcaacatggcgaaaccctgtctctgcaaaaaaatacaaaaaaattagccgggcatggtggtgtgcctgtagtcccagctaattgggaagctgaggtgggaggatcacctgagcccaggatgtgaagactgtaatgaaccattattgagccactgcattctagcatgggtgatacagtgagactctgtctcaaaaaaataaataaaattacattatcaaatctaatagaagtcacaaatgtctaaaaatgctaaaaaacctcctcactggccgggtgcggtggctcacacctgtaatcccagcactttgggtggctgaggtgggcggatcacctgaagtcgggagttcaagaccagcctgaccaacatgaagaaaacctgtctttactaaaaatacaaaattagccaggcgtgatggcgcatgcctgtagtcccagctactcaagaggctgaggcaggagaattgcttgaacccaggaggcagaggttgcggtgagccgagattgcgctatcgcacttcagcctggttgacaagagcgaaactccgtctcaagaaaaaaaaaaaaaaaaaaaaaaaaccctctcaccaacaaagtgacagctttgcaaaaacagataaaggattttgaaactataatattcagcaccccataccattaataaagagataaacaaatagataaataaaagtgaaaaaatggtagaaaacccttatggagtttttatttgtccttggcccaatcacaccccacctctgcgccagtcttgaagacagcagcctgagatcccagtgaggaactctggtcactaattctagagaaagcagatcagatgttattcacaaattattgcctttgtattttccagtcattatggggatgatcagaaggtgtgaaataaggctgtcttttctatttcatctacaatggaatccagttagggtcaaacataagaaatgctgaaaaatggtgcaaaatacacaaatagcctgcaactacttgagacagcagactgtaattaagacatacattaaggccaggcacggtggctcatgcctgtaatcccagcactttgggaggccaaggcgggcagatcatgaggttaggagtttgagaccagtctggccaacatagtgaaaccccgtctctactaaaaatataaaaattagccacgcttggtggcgcatgcctgtaaccgagtagctgcagcaggagaatcgcttgaacctggcaggcagaggttgtggtgagtcgagattgtgccactgcactccagcctgggcaatagagcaagactccatctcaaaaaaaaaaaaaaaaaagacatacattagcccacctaagtctaaaaggaaaaaactggagagaaaatttccttcaggaattagggtattcaaaagcacccattatattgtggaactgagagagccacatgcactcataggaaagaacatattttcatagaagatgtgaggagacccttattttcagctctggcatgtttctaggtttagtaaaacagaaagtaaatgctacagcagagttttaaacagccttgctaagtgttcaaggaattgctccacaagagccatccacaaagactggaagaggtcaggtttttgtatgtttcatcttccttcttacttttagcttgtagcattcaggaaatctctatcagaacacaaatgaacacaagctaaagaacagagacttcagtgtgtacatcagatagggaatagagtctctgcaaacacactttgaaaatgttactaaacaaatgaatagttacagccttcatcaaacaagaacagcaaacaatgaaggggacagaatctgatttccagatgcaaatgtctacttttcaatgcacacaaaattaggaaaaatagagagaaacatgaaaatatggctcatcaatggaaaaacctgaactgagataaaccatctctaagaaacctcaaacattggacttcttgaatgaataaaaactttaaagcaactgtcttaaatatgttcaatgaggtgaggcaatgatgaagaaaaaactaaaagaaaatcagaaaatagatttaaaaaatcaataaaaattagaaattgagcaatatagaactaatgcagctgcaaagtacaacaatcaaaaggaagacttcactatagatgttccacagatgtgaacaaccaaagaaaaaaatcagaggccaggtgcggcagctcacgcctgtaatcccagcactttgggaggccgaggggagcggatcacttgaggtcgggagttcgagaccagcctggccaacatggtgaaatctcgtctctaataaaaatacaaaaattagccaggtgtggtggtgcatgcctgtaatcccagttactcaggaggctgaggcaggagaatcgcttgaacctgggaggtggaggttgcagtgagccaagattgtgccactgcactccagtatgggcgactgagactctgtctcaaaaaaaaaaaaaatcagctaaaatcaagataaaacaattgaatctacccattcacagaagcgggaaaggtcaggggatgaaatggaaaaaatgtgtgactggtatacctgccttgccagtaacgttaaaagaagtttattagagaaaagagaaatgacacaagttagaaattcacatcacattaaatgaagacataaaaaatgatttacttttcttatactttcttgatctaatagatatgtttgctcaaaataatagtatcaacaatgtattgggtgttataggtcacaattgtgcaaatgaatgacagtgatgattcatggaatgaaaggaagaagtttcaaacagtttattataccagcactacccctgaagccagtatagtgttttttgaaactgaaggtccattagttgtgaatggtataatatgtatcctatggaattcactaaaaaaattaagaaccaagtactatactaataggataagaaaatcatattctgctcaactaaaatcaaagacggaaatagagaggtagttgagctgggtgcggtggctcaagcctgtaatcccagtactttgggaagctgaggcaggtggatcacaaggtcaggagttcaagaccagcctggccaacatggtgaaacctcgtctttactaaaaatataaaaattagctgggtgtggtggcgggcatctgtagtcccagctactcgggaggctgaggcaggagaatcgcttgaacccaggagacggagattgcagtgagccaagatcgtgccactgcattccagcctgggcgacagagtgacactccatctcaaaaaaaaaaaaaaaagaaaagaaaaagaaaaaaagaggtagttgaaaaaacagacaagtgcaacaaatagaaaacagtaatatacatatacatattaattcaattatgtcaattactacattaaatgtgtattatctatatttaccagtaaaaaagacaaggactggcagagtagaataaaaatacaaagcctagcaatgtgtacataaaaaacattttaaacagaaagacagagatacattaagtagagaaatatatgccattctagccctaatcaaaaggaacatgaaacagctctattacattcagacaaatcgggttttagattaaggaaaattataaggcatagatagtgagttcagaatgataaggaaagtcaatcctacaagaagacataataatccttaatatttatgcccataaaatagaggatcaaaatacataaagtaaaaaattacaaaaaccacaaggcaaaatacacacatctacaattatagttggagggaaacaactcatctctatcaataattcacagatcagtttgtcagaaaatcactaacgatatggctgaaatcaatagcactattaatcagctggatttcattgatacgtgtttacagaatccttcattcaacactagcagggtatatattcttctcaagcccacatgaaatagtcaccaagatgcacaaaattctgagccataacacacactagaacaaatgttttaaaatagaaattccaggccaggcatggtggctcacacctgtggtgccaccactttgggaggccaaagtggaaggattgcttgaggccagactgagcaacatagtgagaccttgtctctataaaagtataaacattagccaggagtggtggcatgcacctatagtcccagataatctgaaagttgaggcaagaagattgcttgagcctaggagttggaggctgcattgaactatgatcatggcactccacactaccagcctgtgtgacagaccaccaccctgtctcttaaaaaagagaaaagagctgggtgcggtggctcatgcctgtaatcccagcactttgggaggccaaggagggcagatcacctgaggtcgggagttcaagaccagcctgaccaacatggagaaaccccgtgtctactaaaaatacaaatagccgggcatggtggcacatgcctgtaatctcagctactcaggaggctgaggcaggagatcacttgaacccaggaggtggaggttgcggtgagccgaaattgtgccactgtacttaagcctgggcaacaaaagtgaaactccatctcaaaataaataaataaataataaataaataaataaaagaaattatataaaatatgtaatcagattataaaccaataacttaaatatagttgaaaagtctcaaaaaagtggagatttaagccacaaatttctcaagtacacagatgtcaaagaaacttgtcacatgaaatgcaaatattatggtgctgatgaaaaaggatatattttagcaaaatctctggaatgcagaaaaggcagtgctttgagggaaacttaaagaatcgaatgcattctctagaaagtaaaactctaaaatcagtgctctaactttccatcttaggaaactagagaatagcaagattaatgtaaatcaagcagaggaaaataacaatgggaagagatattaatgaaatagcaatcaagaaatcaatagaaaacatcaacaggctgggcgcgttggctcatgcctgtaatcccagcactttggaaggccaaggcaggcggatcacgaggtcaggagttcgagacctgcttggccaacatggtgaaaccccgtctctactaaaaatacaaaaattagctgagtgtggtggcacatgcctgttaatcccagctacttgggagcctgaggcaggagaatcacttgaacccgggaagcgcaggttgcagtgagctgagatcacaccactgcactccagcctgggtgacagagcaagactccatctcaaaaaaaaaaaaaaaaagaaaagaaaacatcaacaaaccaacagatgattctctgaaaagatctgtaaaactgataagccgacagcatagttaacacagaaaaaagagaggccatcactactaaccctatggacattaagagtgccatgaaagaatattaggaacaactgaatgcccacatatttgataaattacatggaatggaccaatttcatagaagacacagtctaccaaaactcataaaagtaacatcaagtaatatgaataggtctatatctattgaataaattgaatcaataaatgataaatatcccaagaaaaaggaacagaccaggatgatttcactggtgatttatggcaaatacttatggaagaaatgatcccaattctctacaatatcttccagaaaacagaagtaggtaggtaggtaatactttcttttcttttcttttcttttttttttttgagacggagttttgctcttgttgcccaggctggagtgcaatggcaccatcttggctcactgcaacctctgcctcccaggttcaagcaattctcctgcctcagcctcccgaatagctgggattacaggcgcctgtcactaagcccagccaatttttgtattcttagtagagacgggcttccccatgttggccaggctggtcttgaactcgtgacctcagatgatccatacacctcggcctcccaaagtgctaggattacaggcatgagccaccacgcccggggcagaggtaatactttctaattgatgttataaggccaacattgccctagtaccaaaaatagacagacattacagacatatctccaccactgaggacataaggggaaaactgccatctttaaacctggaagcaggcccttaccagagatctgacctacttgaacttggattcccagcctctactgagaaatgaacaactgttgtttaaggcacgtagtttatggcaatctggtatagcaatcctacgtaattaagacagggaagcgctttctctaccacacatcaaggctttgaagtctacagtaatcaggagagtatggtgttagcaaagtgatgggtacaaagtccaatggaagacagcaaattctggaacaagagcatctatttaaggtatgagaaactatggcacagcaggtattgccaggcagcgatacaaatgacagctacttcaacccaaagaacagggacaaattgttatctccagaagaataaccaatcttctgcctaacacctccatatacaataatcaactaattacagacctgcctgttttcatgaatttttattcactctattacctcagcttccattttgaatgtggttctctacctttctcataccagaaaaagtattttaagagccttgagacagtattcatttttctgtagtcatcatggaagaaagttttttccaatttattttccctgatggcattttctctgctaagccctgaaattctattgagatgatccaattaaaaacaaaacaacagcaacaacaaaaaaacagacctggaaaacttactacacaggctctgtgtagtacgacagaaaagaaaagtaaacaagaattttttaaaggcatataggactagatatatgtaatttgttttctgaaatccaactctttcttgtccctttagaaacatcttctctatcaatctctaatgatagaatgcattttacagctaagaaaaaactgaacagaaatgagtgaacaaatcttttcaaggttgacaacctcagggaggggcagtgctgactggaacacagacaagtctcattcaagggtcaggtcaggtcctcctgtcacctgggacatcccccacccccgtgctgctcactgaagtgctcagtgactactccctacccccaaccaccagataccgcactgtgtactttcaggctcttacaccacctcactggggtaagttatctttgacctttcggatagtttttcttgcttcactagtctaacagaattcaaaggatgggaatcatttctattttaccccctcaataccagcacctgagtggctgaccagccatgtctccaagaaatgaaaactgggcttggggtgagaaaactgagtatcccagggcttaactttttacaagaggataccaggggaatcctcccaccacagggtatccagctcttcccctgggaggccccagccctgcatctcaggctgtcctctgggaggagtggcccaggggctgatattcactaccctccaagacaaggctgctgtatccacttggtgccagtcccaggcagttatcaaagccagtaccaggaaaagatagtgtgggctcaggactcatcagctggtggtttccaaaggggaacctcaacccaaacacttccagataaggtgcctgtgcccagagaagataaaaggagaagaggcgcagacatttttcttgttggtttttacagcagagtggttaaaccacctgacaggtggttattctctgcatcctcacatatgaaatattcacaaacaaaaatcatatcttctaaaaaagaatcatatattgctacctggggaaaaaaatgacagttaaaatactgtatttgtttgaaatacagcctgggggacaaagagttcattatgttgctgtgaactgaggacagtgtagagtcttaattagggaaaaggctaaggggaacaggggaaaaggctgttaaattaaagtcttaattagggaaaggctaaagggaacaggggaaagcagaaagataaaacaaaaaagctataaatctgcctatcttcatgtgcagagaatttaaacaaaagagaatgcaggtaagttacgggtctaactttgttttttttcttttttctttttttttttttttttgagacggagtctctctctgtcgccggcccagactggagtgcagtgacgtgatctcagttcactgcaacctccgcctcatgggttcaagcgattctcctgcctcagcctctcgagtagctgagattacaggcatgtgacaccacgtctggctaatttttgtatttttagtagagaaggggtttcgccatcttggccaggctggtctggaactcctgtacatgtctaactttctttatggcccaagacatggccttcttgcccagataacgcacttaattcacagacttcctgctcaccatcaaacgcctcaatttatcaaacaccggggctgacagaggaatgcaagttaagctccctgctgccttggcactctgctgccttggcactatcaatcagcccaagttccattctataaaatcacccacaagcctctgcttctctcctgcaggcttcccatggcctcccttgcgatggattttgcttctttcgctaataactttacctacaactgtcttagtaaaaattattttaccccggcgttaccggcccagatagcagtcgttcccctgtgacggagaggaagtcagctttatgaaatgcagggcaaaatctggaaatctagggatttactgccagccccaggagttagggtgaggggacaagataagcattagacatctgccttcccaaacctttgaagactcagagggacaccggtcccctttaggaagaaaacagagactgaggatcccacagatcacagctcctcacaggcacgaaccccacacacgagtggggattccctccatgacccttccgtgaccctcccccaatcctggggagatggggggctgcgggcgaggagctgcccagacagggctccgaggccgggaccgcagttgccgcgcagggaccggataggacgcccggggtcccggctgccagctcagcctcactctgtggctgaggggaccgagggtcgagctgcgccagggggactcgggtcccagaccccggagctgacggcgggggaggcccacgttcgccgcggccggttctggacggttccaaccagctctttcccacttttgggacgcctgaccctgcacacgcaccatttcccggcttccgggatgttccagggtcctccctctgcctcccgctgccagtgcgggtcccactgtgacagaggctgccacagacgttccagggcgtctctcagcgactgaggctacacagacgttccagggcgtctctcagcgagcgactgagtctagagctgagcgcaggggcgtgaagacgccgcgggctctttgaacctggcaccctactgccagccgtgcgcctgattgacagttctcacgaccccgccccatagctctgattggatagggctccaggtcccgccccctgggcactgagtgacagaagaagcgatcacacagtgctgagtcgagcgggatgaacgagttccaggcacagcccttgacagggcaggcttcctccctgtgctgtcctgatccctcccagggaacatttgcatttatgcagaattacctgcccgtactcagcaggcccttactgccttttcctcctggagaaggagtcacaagtgttttgcagggaatcccagactcacagtccagtggagccattcccctggcctcagagcagaggggagcccaaggccacacaggccacactgcagcaggagggtggcctgatgtccaccgggcatcaggatttgaggatgagactcttggcggcaaggttaagccttcctctctcaccttgcctctcaatctgctcattttcagccaaggaaataaaaacaagtcaagaacggtattaaaatatcaaatgtgtggaagaactgaaatcacacggcagcaataaatgaatgaatgaatcaaaacaaaaatacaacaggaaaaaaaaagcaaaaacttgaactagtgcagataagcagcctgctgccctcatacttcagcaaacgtcccattcaggaggctaaacatatgcccaaacttggcagccactcttaactgttgaaatggaaccccagagtgaaccaaaacctggtgatgagactgggacactgaaggatttgactctgggagctcaacatacttccctgtgccctctgcagagtgtggaaatgcccccaccgtcaagatgtgcattttcaccaacaggaaagtttcatgtaaagttagtttaagggcccggggcggtggctcacgcctgcaatcccagcactttgggaggccgaggcgggtgaatcacctgaggtcaccagttggagaccagcctggccaacatggtgaaaccacatctctactaaaaatacaaaaattagctgggcatggtggcgggcacctgtaatcccagctactcgggaggctgaggcaggagaatcacttgaacctgggaggcggaggttgcagtgagccgagatcgtgccacggcattccagcctgggtgacagagtgagacctggtctcaaaaaaaaaaaaaaaaaaaaaaaaaaggttactttaaggtactgacctacataaactgtcaaattcataaaccctttacccagattttcctaacacataaatggtaaattctgattctatgtgcagcttcgtgctacgtggaggcgtgcgcaggctgctgaggaagcaccaaagggggctccatttctctccctttgcagccttcagaatgggctcggtgtagagtcactggttcaaactctgctgcccactccaggtggctggggctcagaaaacaataccccaaaaagaagaccttggaagaagcctcagaagcaaaagttttttctccacagagggcagaggaaaaacttagtcccattcttgggactcttagtcctactcttctatccaaggctagccttagaaactagaatctctcttctccaaagtgggtcgtagaatccagaacccttttcccctaaatccaggcataaaatcaaaacatactactctaactttccattgtcctttctgtgtaaaaactggccataagcaaattaactgtccaactttgtttgactgcaggtcagggtggccctggggcttccctgggccacattggaagaagatgaatcgtcttgggccacatataaaatacactaacactaacaatagctaatgagcttaaaaatatatagcaaaaacaaaaattcctaatgttttaagaaagatcatgaatttgtgttgggctgcatccaaagccttcctgggccatgggttggacaagcttgctgtaggtcataagaccctccatttcagagtgggtcctgcctcatactgagaaggaaggaatgcatgctcagaaaggccaagaacaatctagacacacaggccttgttgggtttccccactcagtctgttagcattggatcatactctttcaatctaatcacatttctacacggctgtccatacattaagcctaagcattaaaatgaacaatttcctttgtatctctgggtcttcattctgaagcttcctggatatacgcgttaaataaaatttgtatgcttttcctccaattaatctgccttctctccaattaattcagcaaaacatcagagggcaaaagggaatgttccccatggcctctgtaagagtcttcacttgcttctcaccagcactgatgagttaattgaaacaaagaccctcaattccactgtttgaataaaaaattgacaatcttgggtttcttcctgtgtctatatataaagtagtggaaaaaatatatataagatatttaatagggatttggaaactggtaaatggactgggcatggtgccttgggcctgtaatcccagcactttaggaggcaggggcaggaggattgcttgagcccaggaattggagaccagtctgggcaacacggggagatcttggttcctcaaaaacaaaacaaggccaggcgcggtggctcacacctgcaattccaacactttgggaggctgaggcgggcagatcacaacgtcaggagttcaagaccagcctgaccaacatggtgaaaccccgtctctactaaaaatactaaaaattagctgggcatggtggtgcgtgcctgtaatcccagctactcaggaggctgaggcaggagaatcgcgtgaacccaggaggtggaggttgtggtgagctaagatcgcaccattgtactccagcttgggcgacagagcgagactccgtctcaaaaacaaacaagcaaacaaaaccaactggtaaataattattctgttgagaaacaaacatgctaacaaactattatttttaccttagcaaactgttgtgtaaaacaactaattaaatgtgagctctcctctctccttggcttcagtcactccctgaccttcatagctcagggttgacatcatgtgctctgtgcctggggatggacatgtcccatttatccatctgaaaccccctctcaaccccagcccacaccattgacccaaacagtcatatctgtatctaaatcctaagtattgtacaaatacattttccttttaagcaaactggcccaggttgaattcacctgtggttctcatgcccacagtttcatttattcatttgaaacagtcttctcagatagtaatgtcttgggtgaggacacatccattttatttgcttctgttcttcttaacctgtgtcactacctgctcagtgagggcacagacagaatattctaagtgactatcagctgctgtaaatactggaggtctcagcacaaccctgagaaatccgcaccagagaaaggatgtgtgaataatattaatgtcaccccttaccacaacagttagcttatttctctctttttttttgagacgagctctcgctccatcacctacactggaatgcagtggcaccatcatggctcactgcagcctcaacctcctgggctcaagcgatcctcctacctcagcctcccgagaggctgggactgcaggcatgtcccaccatgcctggctaatttttgtatttttttgtaaagatagggtttcaccacgttggccaggctggtctaaactcttagactcagatgatccacccaccttggcctcccaaactgctgggattacaggtgtgagccacgctgtctggccattttattttcctttctggaaaaaggcttttaaaaatggttttccggttttctggggtactttcatacacagcaatacagatgataaaagtaaacataacaccattcagtttggtttcatttatatgatttaacttttcaacagttaagaaaccaaaacattctgtcaaccttaattggatttccctgaatctaaaaagtgccaggaaaaaaattctacaaataaaaacatgtaagagtcactgaggtggtatgaagaaccctgagaaggtgacatttaatgtgagacatgaaataatatattagtgtaaaaactcagggcaaagccaggtgcagtggttcatacctgttaactccgccctttgagaggccaaggctagaagttcaagaccagcctggggaacagagtaaaaccaccatgtctaccaataaataaataaataaataaaaattagccgagcatggtggcatagaactgtagtcctagctattcaggagactgaggcaggaggatcacttgagtctaggaggtcaagactggagtgagctatgatcacactgctgcactccagctttggcaacagagtgagacactgtctaaaaaagaaagaaaggaagaaaacaaacaaacaaaaaaccctcagggcagaggattcagggtagatggcagggtaccaagcataaagaagctgtctccccacctagacaacagttttactggcagaatctgtctgatggagctattttatttattcttattttttgagacagagtcttgctctgacgcccaggctggagtgcagtggcacaacctcagctcactgcaacctccacctcctgggctcaagtgattcttgtgcctcagcctcctgagtagctgggattacaggtgtgtaccaccacacccagttaattttttgcatttttagtagagatggggtttcgccatgttggccaggctggtcttggactcctgaactcaagagatccacctgcctcggaaagagctgggattgcaggtatgaggcaccacacccggcttgatggagctattttaaaacactacagttggccaagcgcagtggctcatgcctgtaatcccagcactttgggaggccgaagtgggaggatcacctgaggtcaggagttcgagacccacctgaccaacatggagaaaccctgtctctataaaaatacaaaattagccatgcatggtggcacatgcctgtaatcccagctattcgggaggctgaggcaggagaatcgcttgaacctgggaggcagaggtcgcggtgagccaagatcacaccattgcactccagcctgggcaacaagactgagactccatctcaaaacaaaacaaaacaaaacaaaacaaaacaacacactacagtctattgaagccttgaaaattccagaaaatgatttggatggtaaactgtggttaattgtggccatttcaacattcagcataggaccagctggacttctccccactacctctgttgcaggcagccatgcacatgtattttcctccagtttggcagtggggtctctcaggagtttggctatgaactctagtgctgccatgatggggctccaggacatctcgttgtgatgtttacagtgtgctttccacaggacacttcattctggtgaagggactaatgtttaaatgtcaatcagtgaccaggtgtccctcacaggaaacttggtggttatactggccgatgtccttgtggctcttgtctgacatgcatccagttgatttcttttttttttttttttttttttttgagatggagtctcgctctgtcacccaggctggagtacaatggcgtgatctcagttcactgcaacctccgcctcctgggttcaagcgattctcctgcctcagcctcccgagtagctgggattacaagtacccgccactacgcccggctaatttttgtgtttttagtagaggcggggttttaccatgttagtcaggctggtctcaaactcctgacctcaggtgatccacctgcctcagcctcccaaattgctgggattacaggcatgagccaccatgcctggccagcatctagttaatttctatcaaaatagccactctatacagagccttgacctggaaataagttggaattaggtgtagcagtcaggtgagacatgtaggagggcattgagcaggccaatatatgcactgtgggagcttcagaaggagaagagagagagagaaggtgaagggagaatattttgagaaataatggaagaacacattctaaattaagtgaaagccatggatgtagacatccaagaagctcaacgaactctaagtaggatgaatacaaagagaaacgcataaatgcacattatactaaagctgtcaaaagccaaggacaacaaagataatcttgaaagcagcaaaaaagaagtgattcatcacatataaatgatccttcataagatcagtagatttctcatgagaaatgttggagaccagaaaatagtgggcagatgttaatcaaagtgctaaaagaaaaataaatgtggccaggtgcggtggctcacatctgtaatcccagtactttgggaggccgacatgggcagataccttgaggtaaggagtttcaggtcagccaggccaacatggcaaaaccggtctctacagaaaatacaaaaattagccaggaatggtggcatatgcctgtaatcctagctactccggaagctgaggcagaaggatcacttgaacccatgaggcggaggttgcagtgagccgagatcatgccactgcattccagcctggggaacagcgtgagactctgtctcaaaaagaaaaaaagaagaagaaaagataagaaaatgtaaccaggcatatagtcacagctactcaggagactgaggtaggaccacttcggcttaggagttcaagatcagcctgggcaatatagtgagaccctatgtcaaacataaaaacaaaaacagtcagctaggcatgatggctcatgcctgtaatcccagcactttgggaggacaaggtgggcggatcatttgaggtcaggagttcaagaccatcctggccaacgtggtgaaaccctgtctctactgaaaaaaatacaaaaattagccaggcgtggtggcgcaagcctgtagtcccagctactcaggaggctgagacaagaaaatcactggaacctgagaggaggaggttgcagtgagccaagattgcaccactgcactccagtctgggcgacagagtaagactccatctccaaaaaaaaaaagtcaactacgaatctaatatctgtcaatactgtttttcaaaagtgagaaaaaaattaagacttgcccacatgaaaaaactgaggtagttttaaaaattattattagatgtgctctgtgagaaatgtagagtattttgcagtttgaaataaaagaacactgggaaaaaaaaaaagaaaagaacactggatggtatctggaaggtgtaggtggaaataaagatcttagtaaaaagaaatacatggacaattataaaacctattatttttatttatttatttgggacaaggtctcacttccattgcccaagatgcagtgcagtggcacaatcttggctcaccgtagcctcgacctcctgggttcaggtgattctcccacttcagcctcctgagtagctgggattacaggtgcatgccaccaggcctagctaattttttgtatttttagtagatctgcggttttgccatgttgcccaggctggtcttaaactcctgacctcaaatgatccgcctgcctcagcctcccaaagtgcttggattacaggcatgagccactgtgcccagccttaagggctttcttatcattgattactttatatgaaaatgaattaaactcaccaataaaaaggcagagataagcagaatgggtgaaaaatatgatccaactgtattctgcctactagaaactcattttagatctcaagacacaaataggttgaaagggagggcatgaagaaaaatattccatgcaaatagtaatccaaatagaacagggggggctacatcactatcatacaaaatagaatttaagccaaaaactgttaaaggagacaaagaagaacactatttataaaagagtcaatacatacagaatatacaacaattattaacatacttgcactaaacaacagaggcccaaaataaattaaacattaacagaaatgaagaagaaatggagagttccacagtaagagtttgagacttcacactacattttcaagaatggatagaataatcagatagaagatcaataaagaaatgaaataacttcaacaacacaataagcaaaacagacagacataatgacatatacaagcatactccacccaatgacagtagaatacacattctggtcaagtgcacatggaacgctctctaagacagaccataattaggacataaaacacaaaaggtcttcatacaattctaaaaactgagataataagatgtatctttttctttttgagacagggtcttgctctgtcacctaagttggagtacagtggcatgaccacagttcactgcagccttgatttcccaggcttaaataatcctcccacctcagcctcctaagtatttgggaccacaggctggagtgcatgccatcacacctggctaattttttcaaattttgtagagatgaggtcttactatgttgcccaggctggtcttgatctcctgggctcaagcaatcctcctacctgggtgtcccaaagtgttgggattacaggcatgagccaccatatctggcctcagatgtatatttttcaaatacagtgaaataaaactataattattggaaaaaaatacacaaataagtgtaaattaattcattcttcaacaaccaatgggtcaaatgagaaattgcaatagaaaatactttaaggccatgagactctgtctcaaaaaaaacaaaaaaaaaagaggttgggggtggtgcctcaaacctgtaatcccaaaagtttgagaggccaagatgggaggattgcttgagaccaggagtttgagaccagcctgggcaacatagtaagactctatcgctacaaaaaaaattaaaaaatcagccagacatgcacatgcacctatagccccaattacttgggaggctgtggcaagagggtcacttgagcccaggagttggaggctgcagtgagccctgattaggccaccacactccagcctgaatgatagagtgagatcatgtctcaaaaattaaaaaaaaaaaaaaaggaaaagaaaaagagaaaataccttaagaccactgaaaacaaaaatctaacacatcagaacttatgagatgcagcaatggcagtgctaagagaaaattttatagctttaaatgcattaattgcctgggtgcggtgggttacacctgtaatcccagcactttgggaggccgaggcgggtggatcacgaggtcaggagttcaagaccagcctggccaacatggtgaaaccctgtctctactaaaaatacaaaaacttatccaggtgtggtggcaagcacctgtaatcccagctacttgagaggctgaggcaggagaatcgcttgaaccggggaggtggaggttgcagtgagctgagatcacgtcactgccctccagcctgggtgacagagcgagactgtctcaaaaggaaaaaaaaaaagcattcattgaaaatgaagaaagaactccaataagtattctaattcttcagtttaaggaactagaaaaggaagcgcaaacttctttaaaaaggtaggagacaaactgggtgtggtggtacattcctatagtcccagctgctcaggaggctgagggaggagcattgcttgaacccaggaattctaggctgtagtgcaccataatcaggcctgtgaatagccactacactctagcctaagcaacatagcaggaccctgtctttaatattttttaaaaggcactacaaagaagtaaataataaagagtagagcagagataaatcaaaagagaatataaaaacaacagacaatattattgacaccaaaagttggtttgtggaaacaaaatggaagaagaaacaagttctaattcattttgtgaggccagcctcactttgagatgaaaggcaagaaaagacattacgagaacagaaaaagactacagaatatcttttatgaatattgaagcataaattctttttttttttttttttttttttgagatggagtctcgctctgtcgcccaggctggagtacagtggcgcgatcttggctcaccgtaagctctgcctcccgggttcacgccattcttctgcctcagcctcccgagtatctaggactacaggcacccaccaccacgcccggctaattttttgtatttttagtagagatgggtttcaccgtgttagccaggatggtcctgatctcctgacctcgtgatccgcccgcctcggcctcccaaagtgctgggattacaggcttgagccactgcgcccagcctattgaagcataaattctaaacaaaatactggcaaatgtacttcagcagcatatttaaaggattataaatatggaatttgttggccaggaacagtggctcatgcctgtaatcccagcactttcagaggatgaggtgggcagagtgcttgagcccagcaattcgagaccagcctgagcaacatggcaaaaccctgtctctacaaaaaatacaaaaattagttgggtgtggtggcatgtgcctatggtcccagctacccgggaggctgaggcaggagtatcacctgagcccgcaccactccagtccagcctgggcaacagagtgagacattgtctcaaaaaaaaaaaaaaaaaagtgggatttattcccagaatgcaaaagtggttcaatatacagcaatcaatgtaatgtaccacattaacgaagaaaaggcaaaaaacacatttatcatctcaaatgatacagaaaaataatttgacaaaattaaataccttatgttccttttaaaaaatacatttgataaaccaggaatggaaagaaacttccttaataggaaaaaagtcacatatgaaaaacctgtaggtaacatggtcaatttgaaagactgaaagccttccctctaatatcaagaagacaggatgcccactttcaacagttctattcaacatactaatggaagttatagctacagaaataaggtaagaaaaagaaataaaaggaatccaaattggagagaaagaagtaaaattatctgtgtttacagattacatgattctatgtggagaaaacactgaagactccacaagggaaaaataaaattttacagcttataaaacaaatgcagcaatgttgcagaatataaaatcaatacacaaaaatcagctgctaacaatgaataaacaatagactaacaatgaataaacaatccaaaaagaaaattaagaaaataattttagttataaaagcatcaaaaaaagtaaaacacttaaaaataaatgaaaccaagaaatcagtgatgtgtacattgaaaactacaaaacattcttgaagcaaattaaggaagataaatgaatggaaagatatcccatgttcatggattccaagacttactattgctaagattaaaatactaccaaaatcaatctacagaatcaatgtgatccctatagaaatcctaacagcttcttatacagaaatagaaaagcctattctaaaattcacttcaaatctctagggatctctaataccaaaacaatcttgaaaaagaacaatgttgaagaattcacactgccttatttcaaaacttactacaaagctacagtgatcaaaacagtatggtactggcataaagacaaacagataggccaatggaatagagtagacagcctagaaataaatgctcatatacagggtgaaatgatttttgacaacagtgccaagaccgttctttggtagaaggacaatctttcaaaaaatggtgttgggaaaactggatatctacatgcaaataataaaagtgaaccatcacattacatcatgtataaatagtaacttatatttaatcaaagacctatacttaaaagctaaaactataaaatacttagaagagcctgggtacagtggctcatggctgtaatcccagcactttgggaggccgagcagatcacttgaggtcaggaattggagaccagcctggccaacatggttaaactctgtccctactaaaaatacaaaatttagacaggcgtggtggtgggtgcctataatcccagctacttgactacttgggaggctgaggcatgagaatcacttgaacctgaggtggaggttgcagtaagtcaagatcatgcctctgcactccagcctgggtgacagagggagaaaaaaaaattacttagcagaaaacataggggaaaattttgttaaatttggcagtgatttattggatacgacatttaaggcacagacaaccaataaaagataaactggactacatcgaaattaaaaacttttgcgcaccaaaggacaatctcaagatgaaaagaaaacctacagaaagggagaacacatctgcatatcacatatcaaataagggcttaatacccacagtgtataaagaattcctacaactctcttccaagcacttgggagctgaaaaaagaaagaaattttctaaatattaaaaactaaaaattttaaataagaattcctataactcaacaacaaaacacaaatgactcaattttaatgagcaaaggattttaaaacaaactggttcaaaaaatatataaacaaccaacaaaaacaaaaaccaatgtgcattattattggtcattagggaaatgcaaatcaaaaccacaatgaaaaagcagtacagaaccattaattggctattatgaaaaaaatacgacaaccagtatatgtgacaatgtggaaaatagaaacccttatgcattgctggagagaatgtaaaacattgtagccactttgtaaagcaatatacctgttcctgaaaaaggtttacaccaattattctgtgaaccagcaattacactcctagggatacatatatccaaaagaattgaaagcagggactcacacagacatagacataccacatccacagcagccttattgatagcagtcaaattattactgtggaaacaacccatgtttatcaacataaaaatggataaacaaagtatgctttaaccatacagtggaaatttattcagacacaaaaacaatgagttcctgatacatgctaccacatggataaaccttgaaaacgttctaagtgaaataagccagacatggaaggacacatgcatacttccacatatctctctctctatgaatagtcaaattcacagacagagaaagtagaatggagattttcagtactttgggataggatggaataggtaattacatgtatggaacactaagtagatagagcaagtagcacagtaacacgtataaaatgatcccttcctttgtgtattctagtttgtaccagcactgtaagaggcttccagatgagcagttccagtggttaatgttggtagttcaaagggtaacactgccctctaggcaacatcgtggaggtctatttgagatatatttcactacaagttattctcatgaatacttcaatgaaacagctcttatcaaggcccccagtgaccaaatacttgccaaaatctacagtcaaccctttttccttgtcttattcaaattctcagtgacctgtgacacagctgaccactctccccatattgaaataccttcttctggaggcttccaggagaagaaacccatgttttcctcctactacttcattgggtgttggaaaccattatggagtgaggaagtcaatgatttcaggagcttctccactattgatgaagtatcaggaatatctcaaatgctgcaagggaggttggtggggaaaacaatctatgacatgcttgaagactttattgaggaacacattgacaggacaagagcaccgccatctttataacactccaccatcctaagctttaagtttctatttggccacctggccaaaactgaaaatgtcagccccgcccataacttcaacagagaataacggccctaactgtaacagaacagccaggacttccccaacccctccctaacagaattttgtttcaaagcacacttctccactgggccctttaaaaaagcctcaggctgtaagagaagtttgcacctgaccctgccgctggaagcccttctcaggtttactcccaataaaactgtctcaactgttgagccaccttctcatctctcctttccttaatctttctatcccaacacaaataagagagcataaatactaacaaggaactcgaagatatactgaaattctctgcagataatgatgataatgatgatgcagaagacttagaagaggtaatatcaaagatgtgacacttgaaacatgtgcagcagtttttggggcatctacagcctctgcaaggtgaaaagtattaaagattacaatcctcgcagggcacggtggctcatgcctgtaatctcagcactttgggaggccgaggcaggtggatcacctgaggtcaggagttcgagaccagcctgaccaacatggtgaaaccccatctctactaaaaataaaaattagccaggcatggtggcgagtgcctgtaatcccagctactctggaggctgaggcaggagaatcgcttgaatctgggaggtggaggttgcagtgagtcgagatcgcgccactgcactccagactgggcaataagaacgaaactcagtctcaaatgataaataaataaataaaaataaaaataaaataaagattgccatcctcaagtaagatccttcaatggaacaaaacctctgtgtcacccaagggataacatgccaacaaacactgcaaggatatttaaagaaaaagaaccagcttcctacaacaatgtttctaactaaatatctgcaaatatgaagacagatccttcagtgtgtacacatcttcagccctcatgctgaacagattctgacattagtattatttagtctcttccaaactcagcatctgcaatcagaacctggttcatccaacacagatgatcatcctgacatcctgtcaagattcaagtgagcctgatgtctcactgtttatctacagtgccacccatctagtcacctcagtgaatcatattaggcaccatactgtaatcagcatcatcatgatcatgatcatcatcatcatccttgggttatcaagcaagaaggatcaggattttcataagtgttaacacacgattccaggtcattaaataaaagcaatctatgattgttgaaaaaaaagaaactgtagattacaggctcatgcctgtaatcccagcactttgggagaccaaggcaggcagatcatctgaggtcaggagttcgagaccagcctgaccaatatgatgaaaccccgtctctactaaaaatacaaaaaaaaaaaaaaaaaaaaaaaaattagctgggtgtggtggcatgcatctgtaatcccagctactcaggaggctaagacaggagaattgcttgaacccgggaggcagaggatgcagtgagctgagattgtgccattgccctccagcctgggcaataagagtgaaactctgtcttaaaaaaaaaaaaaagaaaaaaagaaactgtaacattctaggtgacatgtactatgtaggcaggcctgtgatggttgggtctgttctcaacagcacaggattattttcatatcacgattctctaaaaaaaatacaataaaatgactgtttacatagcttttacaacacatgaggtattttagtaacctactttttatttttacttttacaaaagctttgggttggtgaaaaattaagtaatctaggcatgatttatgggatgcaggaggatgtggataggttacatgcaaatgtccttttataaaaggaacacagcatctgtggatttaggtatgcttagggggtctggaaccaatcccctgcatatggttaggggataaccatattcaaaagaaacatcttaaggctttaccatgtgtttgcattcatgaggcttatctcctatgtgatttctttcacgtttctgaaatgaaataaaattaatgaatgcttttccacatttatagagtatctctccagtgagtccttttatgtctatgcaaggaactgagagaactcagtgccttcccacattccttacattcatgcatcttctctccagtgtgagttttttcatgtcctcgaaggaaacgagaacgagtgaaggctttaccacattgttgacattcataagatttctttccagtgtgaattctttcatgtcgcagaaggcaagtgagccaagagaatgctttcctgcattccttacattcatatggcttctctccagtgtgaatcctttcatggacttttaagttaccaaaatgactgaaggctttcttacatgttttacattcataaggtttttcagccatgtgagtccttctatgttgagaaaggtatgtgaaacaactgaatgctttcccacattccttacactcatatggcttctctccagtgtgagttgtttcatgattttgaaaggaatagaaatcaataaaggctttcccacatttacatttatagggtttctctccagtgtgagttgtttcatgtcttcgaagggaactagaaatacggaaggctttaccacattctttacattcatagggtttctcaccagtatgagtcctttcatgtccttgaaatacactgggataaatgaaggctttcccacataccttgcatttgtgaggtccatctccagtgtgcattatcatatgacttcgaaagcttgagtgatgagataacgctttcccacactgcttgcattcatagggtttctctccagtgtgagttctttcatgactttgcagtgaactaggacaatcaaagcctttcccacatatcttacatttatgaggtccatctccagtgtgccttatcatgtgtctttgaaagcttcccagatgatgaaatgctttcccgcattgcttgcattcatagggtttctctccagtgtgagttctttcatgtattcgaagggaactggaaacactgaaggctcttccacatcgtttacatttatagggtttttctccagtgtgagttctttcatgtcttacataggaactgtaatcagggaaggctttggaacagtgcttgcattcatatggtttctccccagtgtgtgttctttcatgtcttagataggaactgtaaatagggaaggctttacaacactgcttacattcatacggtttctctccagtgtgagttctttcatgcatacgaaataaactaggccaaaaaaaggctttcccacacaacttacatatataaggtccacctccacgttgtactattatgtgtcttcgaaggtttcccgaagaactgaaggttttcccacattccttacaatcatagcgtttctttccagtgtgaggtctttcctgtgtttgaaaggagtggtgataattgaaggctgtcccacattgtttatgtgtatgtggcttctctccatattcctgacactcatctggtttgtgtccagcatcaaatgtgatatagcaattaaggaatgaacaacccatgatttctccacacacactgcttttacatggatctactccaggaggtttttcattcacagtactatctggctggcgactttcactaaatctctctatgatatgacatctgtaaaacatgagaagtatattaataaaggtttatttataaatgactttatgtttattagtaggtactggatttacatttttacatcatcatgcaacgtgtaggcttcatgcactgcttgaacgtgaatggactgaatgttgtacaagataactcgaccccagctgttttcttgacaatgataaacacatgaaattcttttttttgagatggagtctcgctctgtcgccaggctggagtgcagtggcatgatctcagctcactgcaacctccgcctcccaggttcaagtgtttctcctgcctcagccgcccgagtaactgggactacacacatgcgccaccacgcccagctaatttttgtatttttagtagaaacggggtttcaccatgttggccaggatggtctcaatctcttgaccttgtgatcgctcgccttggcctcccaaagtgctgggattacaggcgtgagccaccgtgcccagccgaattcttaatattgtttctaagggaactatttttgcaaacactgaatagttatatcacatttaagtatatgtttctggagaaaattgtataggaataaataagtttgtactgggctcgttcattttctttgcctagttgtataatttcctgtcatcctaagaattgctccacagatatatgtctttctcttgtgagtgcaaattaccttaggctcctcctgggatttctgtgctgatcttcaatgtttgtgtcttcccatttcattcctaaaaggtggacacagaaaaaacactgtagattattataaaattctaaaaacactacaagattttatgtacaatggaatcatgcatgattcattcactgaattgtagctgactcttgaacaacataggtttgtacctcgtaagtccacttattttatgttttttaagatggagtctcgctctgttgcccaggctggagtgcaatggtgcaatctcggctcactgcaacctccgcttcctgggttcaagccattctcctgcctcagcctcccaagtagctgggactacaggtgtgcaccaccacacccagctaatttctagatttttagtagagacggggtttcaggtgggttttgaactccagacctcaggtgatctgcctgcctcggcctcccaaagtgctgggattacaggcgtgagccaccacacctggctcacaagtccacttatatatgaattttcttcagtctctgctacccctgggacaccaagaccaatccctcctcttactcagcctactcaatgagaagacaatgaggatgaaaacctttatgatgatccatttcaacttaatgcacagtaaatacagtttatcttctttatgattttcttaacatttattttctctagcttacatttttatgagaatatagtatgcaatatatgtgacagacaacatatgtgttaattgattgtttttgtgaccaataagcctgccagtcaactgaaggttaagttgtagtgaacaaaaagttatatgaatatgtacaactggttggggacccagcaccacttaaccctgtgttgttgaagggtcaactatatcccctttcggtatttcaaatcattcaacagcattgatgaccaagaaaaaaatgtctctaattgactaagtgaagacataatgtcatttttacctatacagtccaggttcctaatggtttcccacatcacatctctgtacagactcttctgtgatggacccagcaaagcccactcttcctgggtgaagttcaccgccacatcctcaaaggctactgaatcctgaaacaccccacatgtacaaaggagtaaggctgagactgatagtaccaaaaatttacacccacttcataaactttgcatactattatttctaagcaatgattcaatgacatggtaaatccacccttattctctgtctacaatcactttctccaacacagcaattctgatgctagaattgaatgttgttgtacacataatagtcaaataggaacaagtctctttttgatgacttaaatgagtgaattttattgccggcatcatccctaatgtctactttatagtgggtctgtatttcctgtcgtgacaaagtcctactacttactgtacaagaataggagtcctgagattgtatatatttacaaatgctggttaacaaaattggatccttcgtgtactctaggcactggatttatagagggtctccaccaacataactaataacaggtgctgagtgtgcataaactgtttatggagaaagtatagtatttgcttaactcttaccttctcttcgggagcttggaattttgttacatgctcagcagtgggagcatagctgatcagccaatgctaggtttgaatgtttgtccccaccaaaatgcatgctgaaacttaatccccaatgtgacagtaatgaaagatggcgcttgaagaggttattgggtcttgaggatttggatctcaagaaaatcaagattaatccattcttggattaatggcttaaagaataaatgggtagtgacagagttggacttatgtccctatgagaagagaaagagacctgggctagacactcagctccctcatcacatgacgccctgtgccacacagggactcgacagagtctccaccagcaaggaggttctcaccagatatccagccttgactttggacttcccagcctccagaaccacaaaatatatacactgtttcatttaaatcatctagcttcaggtattctgttataagcaacaaaaaacacactaaggtagacacaaagaaacactctgggcactgagtctctaatgaatgacatccataaataacttttcaaaatgtttattgcaacatgttacttggggattcagcccatcctatgtgattacactaagagagaacatttagaagccagcaacaggtttcctctagatcaaatgtagcaaagcaagacaaaagactaataaaagatgcttcaccatcccaatgcaagaattttaaactttttattaggtaatgtcaaaggagaataatggggacagattgcacatgttcttagaaagaactcaatgttacctctcatgaatatcgataatattccctaaatagctaaatcagaactttagtagtcaacaaaaaaagatatccccaaaactaacagaagtcacaaatgtataaaaatgctaaaaactttctcaccaacaaagttacggctttacaagaacagataaagaattttttttttttttggaggggggagacagagccttgctctgttgcctaggctggagtgccctggcacgatcttggctcactgcagtctctgtctcccaggctcaagcaattctcctgcctcagcctcctgagtagctgggattacaggcgtgtgccagcacactcagctaaaacatttatgatgattcatttcaacttaacgcacagtaaatatagtttatcttcattattttcttattaacattattttctctagcttactttactgtgagaatatagtacgcaatacgtatgacagacaatatatgtgttaatcaattgtttttgtgaccaataagcctgccagtcaactgaaggttagctgtggtgaacaaaaagttatatgaatatgtacagacctcaagattaaatgagaaaaaaaatacgtattaaagacaaaactaggccaggagcggtggctcacgcctgtaatcctagcactttggaaggttgaggcaggcagatcacgaggtcaggagatcgagaccatcctggctaacacagtgaaaccctgtctctaataaaaatacaaaaaactagccgggcgtggtggcgggcacctgtagtcccagctactcgggaggctgaggcaggagaatggcgtgaacccaagaggcggagcttgcagtgagccgagatcgcgccactgcactccagcctgggtgacagagcgagactccatctcaaaaaaaaaaaaaaaagaaagacaaaactagtattttaaacagtaacaaggtctttttcagatttaatgagaatttttttttttttttgagacggagtttcgctcttattacccaggctggagtgcaatggcacgatctcagctcaccacaacctccgcctcctgggctcaagcaatgctcctgcctcagcctcccaagtagctgagattacaggcgcacaccacacgcccggctaatttttgtatttttagtagagatggggtttcaccatgttggtcaggctggtcttgaactcctgacctcgtgatctgcccgcctcagcctcccaaagtgctgggattacaggcatgagccaccgtgcctggccgaggattttcttaagtaagaaaataaaggccgggcacggtggctcacacctatattcccagcactttgagaggccaaggcaagtggatctcttgagcccagcagttcaagaccagcctgggcaacatggtgaaacctgatcactagaaaaaatacaaaaatttgtccaggagtgggggtacatgcctgtagtcccagctacctgggaggctgatgcctgtagtcccagctacctaggaggctgaggtgggaggatcacctgaacccagggaagcagaggctgcagagagcctggatgacatcactgtactctagcctgggcaacagaatgagaccctgtctcccctcaacctcccaaaacaaagaaaagaaagtagatttcaaatgaggagtcttccaaattcaactatattaaaattaggcatagtggctcacacctttaattccagcattttgagaggctgaggtgggaggatcccttaagcccaggagtttggggctgcagtgagctgtgatggcgccactgaactctagcctggggtcacggagcaagattctatctcaaaaaaaagtccatcaaactgtagaatgaaataaaaagataaaccaccatctggaaagaaatactagcaatccttccatgtgaaaactggttagtatgtacagtatgcttaaaaacaaaaagaaaggccaggcgcggtggctcacccctgtaattctagcactttgggaggctgaggagggcagatcacctgaggttgggagttcaaaaacagcctgagcaacatggcgaaaacctgtctctactaaaaatacaaaattagccgggcatggtggcgggtgcctgtaatcccagctattcaggaggctgaggcaggacaatcgcttgaacccaggaggcagaggttgcagtgagctgagatcgctccattgcactccagcctgggcaacaagagtgaaactccgtctcaaaaaaaaaagagagagagagaaacaaggcaaggcaataatatccaaataaattaaacatgaaaaaagacagaaaattacttcacagaagatgaaagaccacaaagaaaaaaatgctcaacaccaatgctaatcagcaaaaaccaatggagatatataaaacataaatctttacaaggcataaacacacacacatacatggtctgagagctgatctacacctgctattaggatttcctcataaatttaaactatccataatctacaatacaacaattttttcccaatgaatagtatcccaatgagttaaaaaagtcatgaagtgttagcacttagggacaaaaaaagaatattttcaacaacatcataaggttaacctgaaagaactcaagtcccatgaacagtgaaatgtgtgaggacttggtgacccacagcctcagacaacagcgtatgtcaaacagattgaagcaaataaacaaatcaaaaaccttttcatcgtattttctcccctctcctttcatctcttcatgtctttggagtcaattaaatatttttcattattccaatttgtttattttctttgcattttagttctattttttttgcattacattttaacaagctgctcctgggaagcagttctcatactttatgtgcattacaagcatctggaggacttaacacagattattggatcctacccccagaatttctttttctttctttttttttttttttttttttggacagagtctcgctctgccgcccaggctggagcgcaatggtgcaatctcggctcactgcaacctccacctcctgggttcaagccattctcctgcctcagcctcccaagtagctgggattacaggtgcccatcaccatgcccagctaattttgtgtatttttagtaaagacggggtttcgccatgttggccaggctggtctcgaactcctgacttcaggtgatctacccaccttggcctcccaaagtgctgtgattacaggtgtgagccaccatgcccggccctacccccagaatttctaattcagtaggactagagtataatcctgaaatgtgcattcctttttaaattttgatgttgtttgtacatattcacggggtacaggtctaatgttgccacaatgatatagtgcattgtggtgaatgaagtcagagccttcggtgcatccatcactgcagcaaagcacatgcatccaccaagcaactgcccatcatccaccatcctccaccctcctagagtctccactgaccatcattccacactctgcttccatgtttacacattatttacacgtgggaggtatatttgcccacctttttttttttttttttgagatggagtttcgctctgtcgcccaggctggagtgcaatggcgcgatctcggctcactgcatcctctgcctcctgggtttaagcaattctctgcctcagcctcccaagtagctgggattacaggcacccaccaccatgcctggctaaatttttttgcatttttagtagagacggggtttcaccatcttggtcaggctggtcttgaactcctgacctcatgatccacctgccttggcctcccaaagtgctgggattacaggcgtgagccaccgtgcctagcctactcacccacttttaagtgagtacatgtggtatttgtctttctgtgtctgaattgttttgcttaagataattgcctcccaatccatccttgctgtcacaaaggacatgatttcattctttttcatggctgaatagtatcccaatgagtatacacaccacgttttatttacccaatcctccacttaggtcgattcccttatctttgctttgtgaatagtgctgcaatatgcagataagtgcaggtatctttttggtgtactgatttcttttcctttggatagatacccagtagcatatctgagacactcagcataatactgagtgcatattaatggtaacattaactaactgaaaacagaaaagaggcaaaactatgctactggataaatacacactgaatctataatgagcaacaaaatacaaactctaggtcagttatgcttctgacctgtagtgtcttacctcacacaacttctgacaacaaatgtatggcatttgctgaacaccaattctccaacaaaaactggtatccaccccacattagtacagaccccacaagttgagggttgaatgtcacaaccaatcagccaccaggcagatgccagtggcaagccccagagaccatccttttaatcaaatgtgtataaaaccaatgactccctctacagggtcaataatgtgccaagccaacccacagaactcagcaagtcactctgcttaaggttgtcagtttgttataaaggatatctcaagaatagccaaaaagagagaggcacagcaaaggaaggggagggattggcaaaccttcccctcttggctgacattacccacccagcaaatccaaatacattttttattatatcaaagacccagataaactctcagattcataaaccctttttccatcaggcagaatcaaaaggtgtctttctctaaatcagctgtgacagactttttaatttgtactgattataccaactgagtgaatgcaaaaccaggctgctgataatgttgaattttacccaaggcctgtaattctagtaaataagtaagatgacagaaaatcacctcaactccccaagcccagttctttgtgttctggacaagcagccgtaaaacaaaacaaaataaaagcaccctttgcttacatagattatgcccctccccccttctctaaactataactcagccagataaagaacctccaaattcccattttttatcttatgattagctgagcagttttgtcttcactgatcatactgaacaaaatacatctaaagaaaactttgcttaagtttttctccttgctccaggaccgtgaactttgactcatcctcagcctgagccagcacaaaacccctccttcataacccatcttaagaacagacttaggttagagcaaaacactctctgaactagaatctgattctcggcccggcgtggttgctcacacctgtaatcccagcactttgggaggctgaggcaggcagatcatgaggtcaggatatcgagaccatcctggctaacatggtgaaacctcatctctacaaaaatacaaaaaattagccgggcgtagtggcatgcgcctgtagtctcagctactcgggaggctgaggcaggagaatcacttaaacccgggaggtggaggttgcagtgagctgagatcacgccactgcattccaacatgggcaacagagctctcgagactctcaagaaaaaaaaaaatctgattctcaccctccatcctgccctccccttcgcatcttccttctaatcttggttgctcttcccttagcaagaaaagaacttttctgcccaaccttagagatgcctcagatctttattttattttattttttttgagactgagtttcactcttgtgagccaccgcgcccagctgggatgcctcagatcttatacttgatgctttcccgttttgcagtactcctttagaatgaagtcacttcttagctaaatgcagatttattttaattgagaatgtctagcaacagccccacaacagtaacaaatacaacctcaaacagggaatcaccccaactgccccagctttctaatgctctgtagcttctttaagtataaaaggcttctcccatggctggagtgatccggaggctcccaggaagaaccaatttaagtgggccttcaataacctccctttgcaggctccagactggcctcaactgggagtcaccggcctcaggcctctccaccccactcacttcctcccatgccttacatggaaagttacttggtttagttagcatttatttatttattagttagtttagttagtatatatttatttatagatgaagtctcactctgtcacccagactggagtgcagtggcgcgatctcagctcactgcaacctacactttccaggttcaagtgattctcctgcctcagcctcccaagtagctgcgacttcaggtgtgggccaccacgcccgtggtggtggtgggcgcctgtaatctcagctaatcaggaggctgaggcacgagaatcacataaacctgagaggtgatgctcgcagtaagccaagattgtgccattgcactccagtctaggcaacagagcaagattccatctcaaaaaaataaaaaaataaaaaataaaggtaggctgggagcggtggctcaagcctgtaatcccagcactttgggaggctgaggtaggaggatcatttgaggttgggagttcaagaccagcctgatcaacatggagaaaccccatctctactaaaaatacaaaattagccgggcatggtggtgcatgcctataatcccagctactcgggaggctgaggcaggagaatcgtttgaaactgggaggcagaggttgcagtgagccgagattgtgccattgcactccagcctgggcaacaagagtgaaactccgtctcaaaaaaataaaaaataaataaaactaaataggaaaagcacaagtatctacccatttcaggcaacaaataccatttaattactacttccataataataaagcatttagtaaattaataatatttgagttctttagctgttggaaagtcctgtgccacagcatttagcattaatctgtcaagtacacataataggaatagaacagttatccactgtcctaaattccccaccctaaaaaggaaagaaactaaagttttggtaaatctttataattcaatcaaataagtaccacattttctgttaatatgtgttcactttttctgcagccataaagaaagtacgaccaaacatttttccttagtcatactgtcactgttaagccctgaaattccatttgaataatcagagaaacttacttgacagactgggggaaaaaaaaagtaaatgaagggtttttttgtttctacaaaaattggacctccccctccccctctgcctccccctccccctctcgctgtccccacggtctccctctccctctccctctccctctccctccacggtctccctctgatgccgagcggaggctggactgtagtgccgccatctcggctcactgcaacctccctgctggattctcctgcttcagcctgcggagagcctgggattgcaggagcacgccaccacgcctgactggttttcatatttttttggtggagacggggtttcaccgtgttggccgggctggtctccagctcctaaccgcgagtgatctgccagcctcggcctcccgaggtgcagggattgcagacggagtctcgttcactcagtgctcaatgttgcccaggctggagtgcaatggcgtgatctcggctcgctacaacctccacctcccagccgcctgccttggcctcccaaagtgccgagattgcagcctctgcctggctgccaccccatctgggaagcgaggagcatctctgcctggctgcccatcatctgggatgtgaggagcccctctgcctggccgcccagtctgggaagtgaggagcacctcttcctggccgtcatcccgtctaggaagtgaggagcatctctgcccagctgcccatcgtctgagatgtggggagcgcctctgccccgccgccccatctgggatgtgaggagcgcctctgcccagcggcgaccccgtctgggaactgaggagtgtctctgcccgaccgccaccccgtctgggaggtaaggagcgtctctgcccggccgccccgtctgtgaagtgaggagcccctccgcccagcagccgccccgtctgggaagtgaggaatgtctccgcccggcagccgccccctccaggaggtgggggacagctcccgcccggccagccaccccgtccgggagggaggtggggggcagcccccgcctggcagccgccccctccgggaggtggggggcgcctctgcccggccgccccgtctgggaggtggggggcccctctgcccggccgccaccccgtctgggaggtgtacccagcagctcattgagagtgggccatgatgacgatggcggttttgtcgagtggaagtgggggaagtgtggggaaaggaaagagaaatcagattgttgttgtgtctgtgtagaaagaagtagacacgggagactccattttgttctgtactaagaaaaattcttctgccttgggaaaaaaaaaaaaaattggaggctgaggaggcagatcacttgaggtcaggagttcaagaccagcctggccaacatagtgaaaccccgtctctactaaaaatacaaaaaacaaaacaaaaaaaaaattagccaggtgtggtggtgcaggcctgtaatcccagctactcgggaggctgagatgggaggatcgtttgaacccagaaggcagaggttgcagtaagctgagatcgcacaactgcattccagcctgggcaacagtgcgaagctccgtctcaaaaaaaaaaaaaaaaaaaaaaggaatagatggctacatatgtgacctgttttctgaaatctaactatttctggcctctatggaaatactttctctatcaatctctaatcttatagttaataaaacgttgaagctgaaaagagtgagtatctcttttcaatgtgacaacctcagggatgggcagcactgactcgaacacaaacaagtctaactcaggtgtcaggtcatcccatctcctgggacattagtcacccccatctgctcagtaaagtgctcagtgaccacccaccaccaccccaggagatacttcactgtgtgcttttcaggctcatgcacacctgacctgaatgggaggttcttgcacaactggaatgagtgggttctccagtgcttacatattgttttctctcttcattagtctgagagtcaggaaggaagagatcacttctgtcttctcccccaaatacaatcattcaactggctgaccagccgtgtgtccccaaggaatggaaactggggttggggaagaacaaggtgattgtcccaagggttagctttttatagaaatggtataccagaatattcctcccatcccacccagggcatccagctgttctctgtgaggccccaccccaacacctcaggctgctcactgggagaaatgacccagggactgatattcactggaccctcccagagacagggcagctgtgtgtatcttgggtcaaccccaggcagttctgaaacagaaccaggaaaaggcagagagtgggctgagaacacatcaccccataaagtttctaaaggggactttcaatgttgattaggtatccgtacccaggggaaagaaaaggagagacacaaaggtttttttgtttgtttttttgttttttacagtgcagtgtcaggttattctctgcttcctcacatgtgaaatgttcaggaacacaaatcttttaagaagccggccgggcgcggtggtcacgcctgtaatcccagcactttgggaggccgaggcgggcggatcacctgaggtcatgagttcgagatgagcttggccaacatggtgaaaccccgtcgctactaaaaatacaaaaaattagccgggtgtggtggtgggtgcctgtaattccagctactcgggagggtgagacaggagaatttcttgaacccgggaggcggaggttgcggtgagccgacatcgcaccattgcactccagcctgggcaacaagagcacaactccatctcaaaaaaaaaaaaaagaaagaaagaaaaaaagaagccatccattgctctctgaaaacaaaatgaaaattaaaatactgggactctgaaatttagcacgggtggggcggaggagggaggagttcatgatgttgctgtgaactgaggagggaaagttagcctgcgtaaggctctggaaaccaagggagttactaccacccctaggaggagttagaatgagggaacagggtagtggatttgagaccctgctacccccatctctgaaaaactcgaagaggaatcagtcaccctgggaagaaaagaagggactggggaccccgcagaccacagctcctcccgtgcacaaaccccacgcaagaatctggattctgattgcagttagatattaaccaggtaccctgagccccactgcctcgcgggggccgccttcctgagagtcaggtcacagaagacactgaccgccggcttctgcattgtgcctggggataagatctcggagagctgctcgagttgcccaagttctttctcagatcttgaattccaacggaaaggctggcgccaagcagggtgaaaaccccacgagggaacccactcagcaggagaatgcggtttcttcacctcccgtcccaggattcgcctgtcacttccccaccaaccagcgaccccacacttcagccgcccctgtccagacccctaaacacccccatccccaaacctctcatggaggcggaactggggtcttctctcctctccccctattaaactgtttctgctgcaggccttggagtctcggtgcagtgactcggaccgcgaacctgtgccggttacagccgcacaatctgggaagacgcggagctgtgggcatggagctgccccagagagggcgcgggagccggggccgcagttgctgcgcagaaacgggacaggacgcccggggtcccggctgccggcccagcccccagctcccaccccgcggccgaggggactgaaggccggctgggccaggggaactcgggtccacagaccccgcagtcgccgcggggacgcccgggtcccgccacagccggttctggccggttccaaccagtccttcgccctgccccaggacgccgggccccgcacactcaccatttcccggcttccgcggtgtcccgtgttctccccaaggttccccgctgccagcataggactcagcgtgacagtgcctgccactgacctgccagggcttctctcagctacagagccaggagcgggagctcagaggggtgtagaaagctccaccctcctcccggcagcgcgcctgactggcagttcccaagaactcgcccccaacactgattgggtagagctccaaattccgcccccccagggaactgattgacagaagaaggatcttacacggctgagtggagcgagatgaagcggttccagacacagcccttgatagggtgggcttcctcccttcgctgtgacctgacccctcccaggggacatttgcatttaagcggaatttcctgcctgtactcaatgggctcttcctgctccttcttcctggacggggacccacaagtgtgtgctgggaattcgagactcactgcccagtggagccatcccctggcctcagagcggtaggggaggcccaggccacacaaaccacactgaagcaggagggaaggcctggtgtcctccagggatcaggaatttaggatgagactgctggctccatggtcaagcctttctcccaccttatctcccaatctactcattctcagaccagaaaataaaaacacatcaacaatgaaataaaattgttaaatgcatggaaaatctggaattatatggcagtaatcttctataaaggaatcaaaagaagggaaaagaaaaaacctgaattagttcagagaaatttcagccacagttcagcaggaaaccccctttcaggaggttaaacatattttcaagcttagaaggcagattctgactcctgaagttgagtcccagagtgtgtaaccagcagcttagcagctgagtctcaaaccacgttttaaaccttttttttcttcttctttcccttttcctctttcccctcctgatctcaagataataacttcgagataaactgcatagatgttacctctcatcttaaaatacagcctcagaatgtgctgtgaacttccactccctttcctttcccatactacactgccatgccttatgcacatttatttttattttatttttttggagacggagtctcactctgtcacccaggacagactgtagtggctcaatcttggctcactgcaacctccgcctcccaagttgaagcaattctcctgcctcagcctcccgagtagcacactggactacaggtgcacgctgccatgcccagctaatttttttgtattttagtagagacagggtttcaccatgttgcccaggctggtcgtgaactcctgagctcaggcaatccgccggcctcggcctcccaaagtgttaggattacaggcgtgagccaccacgcctggcctgtgcacatttatttacctaaatacttattaagcacacaccatgctctcttatttggtcatatatttccttagaagcttcaggggttggatcttgttaggtaccaggcacctctggaattctctttccaacaaaagattacttcaaagacagaacccacacccagctgaagagtgactactatcggggaaaccagcccccaatatttcaacgtaggttctattttccctaagtgtcggcccatctgagaaattaagagaaagagtacaaagagaagaattttacagctgggcctccaggggtgacatcacatatcggcaggttccatgatgcccacctgggctgcaaaaccagcaagtttttattagggattctaataggggagggggtgtacgaacagggagtaagtcacaaagatcacatgcctcaaagggcaataaaagatcacaaggcaaaggcaaaattagaattactgatgagggtctgtgtcctgctgtgcatgcactgtcttgataaacatcttaacaggaaacagggttcgagagcagacaaccagtctgactagaatttaccaggctggaacttcccaatcctagtaagcctgagggcactgcaggagaccagggcgtatttcagtccttatctcaactgcattaagacagatactcgcagagcagccatctatagacctacccccaggaatgcattccttccccagggtctcaattattattattatatatatttttttgagacagagtctcacgctctgtcccccaggctggagtgcagtggcacaatctcggctcactgcaacttctgcctcctgggttcacactgttctcctgcctaagcctcccaagtagctgggactacaggcgcgtgccaccatgcccggctaattttttgtatttttagtagagaaggggtttcaccgtgttagccaggatggtctcgatctcctgatattgtgatccacccgcctcggcctctcaaagtgctgggattacaggcatgagccaccacacctggaagggtctcaattattaatattccttgctgggaaaagaattcagtgatatttctcctactcacatgtccgtctataggctctctgcaagaagaaaaatatggctttattctgcccaaccccacaggcagtcagaccttatggttatctttccttgttcccagaaaatcgctgttattctattctttttcagggtgcactgatttcatatcattcaaatacaaatgttttacaaacaatttgtacagttaatgcaatcatcacggggtcctgaggtgacatacatccttagcttacgaagataacaggattaagagattaaagtaagacaggcataagaaattataaaagtattaattttgggaactaataaatgtccatgaaatcttcacaatttatgttcagagactgcagtaaagacaggcgtaagaaattataaaagtattaattttggaaactgataaatgtccatgaaatcgtcacaatttatgttcttctgccgtggcttcagccggtccctccattcggggtcccttagttcccgcaacagactacaagattgactgcaactaatgtataacctggcaggatccacgacggagaagtcccttcaccaaatgggacaataattcaagaggggcaaccagagcaagtcacgccacctggtacctctagccccgcttgcctcttctgcattccaaaccctttctttaaaaacccctgggttctctccacaaattgaacagtggaattgctttctgctcttcccctgctaggacagataataaagaaatctcgttccctcttatcacaactcattattattttgacttctttccacacgcggtgagcagccagacccttttgccagttacaagtgggatcagcacctggtgatggggcagaggcactgaaggatttagggatgagggagctcaacttgccctcctgtgtcctctgcgcagtgtgaaaatgctctctccttcaagactttaaatattaatgaattaaatgctccaatcaaaagccaaggcattagaatttgaaaatataaagatttcccatatttgtatgaaatacaagtgtcactggtaaactgagttctttctctagtttgtatgagtcacaaagaaagaatacctaatggaacaaaaaaaaaaggcaagcaggatttattttctggccagagaaggagaaggggtcagagtcagctcttgctccgaagatacttcctcctcctagagctgtgggaagctgggtaattttaagcagctagatatgggaaggggaagtttgtaatatgggtagaaaggaacttcagatgttcacaaatcataaacatgtctctttataccacacatgttcaaaaggccagccgggtgcagtggctcacgcctgtaatcccagcactttgggaggccgaggcgggtggatcacctgaggtcgggagtttgaaaccagcctgaccgacatggagaaaccccatctctactaaaaatacgaaattagccaggcatggtggtgcacgcctataatcccagctacttgggaggctgaggcaagagaatcgcttgaacccaggaggcaggggttgcagtgagcactccagcctgggcaacaagagcgaaactccatctcaaaacaaaacaatgggccgggcgcagtggcttacacctgtaatcctagcactttgggaggctgaggcaggcggatcacgaggtcaggagatcgagaccatcctgggtaacatagtgaaaccccgtctctactaaaacaataaaataaaataaaaattagctgggcgtggtggtgcatgcctgtaatcccagctactcaggaggctgaggcaggagaatcacttgaacccaggaggcagaagttgcagtgagctgagatcgtgtcactgcactccagcctggcgacaaagctagactccatctaaaaaaaaaaaaacacgacgagaaagctgccgtgactttcttctgtgggtggggattttcatcttacaataaggtatcagtgatctaaaccagcagttcctaacctttttggcacagggactagtttcttagaagataatttttccatgtactggagtggggatggttttggggtgattcaagtacattacattgattgtgcacttaaatattattacattgtaatatataatgatgtaattgtacagctcgccatactatagaatcagtgggagccctgagcttgttttcctgcaactagatggtcccttctgggggtggtgggagacagtgacagatcttccagaatctcataaggtgcatgcaacctggatcccttgtgtgcgcagctcacaatagggttcgtgctcctatgagaatctaatgctgcctctgatatgacagaaggcagagctcaggtagtaatgtgagtgatgggaagtggctgtaaatacaggtaaagctttgcttactcgcccgctgctcaccttctgctgtgtggcctagctcctaacaggccacagtctggtaccgatccatggcccagggattggggatccctgatctaaaggcaacaaggggtcactggttctggtttactctggttttgagcaggccttatcttattctgataattggcaaagggtcctgaagctcccaggccatctggagtcctagtaagctagcatacctaaagataaacagactaggaaaaaaaaatgttatccactttttcagaaaataattagcggctgggcatggtggctcacgcctgtaatcccagcaccttggcaggccgaggcaggtgaatcacgaggtcaggagttcaagatcagcctggccaacacggtgagaccccgtctctactaaaaatacaaaaattatctgggtgtggtggtgggcgcctgtaatcccagctactcgggaggctgaggcaggagagtcgcttcaacccggaaggcggaggttgcagtgagccaagaccgcaccattgcactccagcctgggcaacagagtgagaccccatctcaaaaaaaaaaaaaaagaaagaaaagaaagaaaagaaaaagaaaataattagccatttcagctgttttgctttctcagctatttttccaggactggcccagtaacaaaagtaccagatataaaagcatcatgaattggaagctggaacccatggctaaaaagaaagaagccaaacatcaagtgtaattcaatgaaacaaaatcctgaatcaacttgtgataattgtagtgtttcctgacaagacaaattggcaagtttgaaaaacaagaaaaaaaagatgtctgattataactaatgaatgatattcatgcctttaaaaattacacacacatgcacacacacactcacaatctattatcacaagactgttctctctctgaagaatcaaccatctttctgtaagatgcttcatcaacctttcacattaactgcctttggagtaatattatatacttactttttcctagacagttgtgaaaacagggtgcagtgggtcaaaggtggtgtcaggggtttatgttcagattttgcatatttttacaaattgcagcaattaactagttcattactgtgttgatttaaattcttacaaaagcttccagacaaaaataaacactcatataaccatgaggaaaaaattcagaatagaatggagtccagaaataaggccacacacctatgaccacctgatcttggacaaagctgacaaaatcaagcaatggggaaaagacttcctattcaataaatggttatggtttaactggctagccataggcagaagactgaagctggaccccttccttacaccatatacaaaaatcaactcaggatggataaagacttaaatgtaaaacctcaaactataaacaccctggaagaaaacctaggcaataccatcctgtacacaggaacaggcaaacatttcatggcaaagacaacaaaagcaattgcaacaaaagaaaacattgacaagtgggatctaattaaatttaagagcttctgtacagcaaaaggaactatcaacagagtaaacagacaacctacaaaataggaaaaacatcttcaaactatacatctgacaaaggtctaatatctaccacctataagaaacaaagaaatttacaagagaaaaacaaacaccaccattaaaaaatagtcaaaggacatgaatagacatttttccaaagaagacatacatgcagaggccgggggtggaggctcacacctgtaatcccagcactttgggaggccaaggtgggcggattacctgaggtcaggagtttgagaccagcctggccaacatggtgaaaccccatctctactaaaaatacaaaaaaattatccagacatggtggcgggcgcctgtaatcccagctacttgggaggctgaggcaggagaatcgcttgaacctaggaggtggaggttgcagtgagcccagatagcaccactgcactccagcctaggtgacaagagcaagactccatctccaaaaaaaaaaagagaaaaaagaaatacacttcaatcaatgcaatcatctagaggaatataaaagacaaatttttattaactgatttcatcaaaaaacactacctattcaactcatgaatttatgtgtcaagagaacttatttacagaattctctcaccttgatgtgtttttttctgaaagtaagatgtaggaatccatagtccagatccactttaagcaggaggcactgataaagacaatagagttacaccttttatgacaattctttgatgttccaaattttctggcacattttgcacgagtgaatttggatgtgagttttctttttttggagatggagtctcactctgtcgcccaggatagagtgcagtggcacgatctcaactcactgctacctctgcctctggggttcaagcaattcttctgcctcagcctcctgagtagatgggactataggcacatgccaccatgcccagctaatttttgtatttttagtagagacagggtttcaccatgttggccaggatggtcttgatctcctgacatcgtgatctgcccgccttggcctcccaaagtgctgggattacaggtgtcagccaccgcacccagccggatctgagttttctaaattacatttatagcatatctagccagtgtgagttatgataaggaatcgtcaatctaccaaagttgtattaatatgtatatccatggaggtgacacttacgtcaattgacacttacatcatttcatcaggaaacatagacagatgctgcacatgaaattagccctaggctggacgcagtgagtggctcacgcctgtaatcccagtactttgggaggccacagtgggtggattgcttgagttaaggagttggagaccagcctgggcaacatggcaaaaccccgcctttaccaaaaacaaaaaaaaattagccaggcatggtggcgcacacctatagtcccagctacttgggaggctgaggtgggaggatcgcttgagcccgggaggcagaggttgcagtgagctgtgatcccccaattacactccagcctgggtgacaaagtaagactctgtctttaaaaataaaagaaagaaaggcttttacctgagcgcaagatgggtcaccagctgtactggagacaccggttctcactcttgtcgcatctgttcaaaccagcatggtctgatccggaaatatggtctcaatatgtgccgccagtgtttctgtaagtatgcgaaggatgtaggtttcattaagttggactaaatgaccttccttcaaagggttatccaaagcacctacccaatgaaaaaccaggatagttctttgtatataaaataaacattttttaaaaaccttcaaaaaaaaaaaaagaaattagccctattcctcagaaatttatatatttttgcaagaaatgtgattttaattcaatagcatacagtacatgttattgtaaatgcagtatacatttactccataagtaggaaattcactccttcccaagttttaatggttttctaatacttttaaatgttttgtctttagtttcccaaccaaatatggctatcatctctaaacacaataattttttttccatcctagtttttatattgtttattgatttttgacaataagttttatagactactgtaatagtgagaggaatgaaatagaactattttatttatttatttttttttttgagacatggtctcactctgttgcccaggttggagtaaagtgttgcaatcatgactctatagccttgacctcctgggctcaagtaatcctcccgcctcagctacctgggtagttgggattacaggttaaaaacaccatgcctagttaattttaaaattttttctagagatggggtgtcactatgttgcccaggctggtcttgaattcctgggctcaagtcatcatcctgctttggccttccaaggtgctgggattacaggcatgagccactgtgcctggctatgtttccttttgttagcttatgatcctccttttcagtgggaagcctgtcacacaacagtttctcatcatgctgtgctctgaaacataccttaaccaagaatcctacatcaaggaaagctcatgtttaaaatgaaagacaaaacaaagtctttttcaagaataaaaacatacatattgagacgatttgttcctaccacaccagacctacaagaaagatgaaagaaagtccttatgtctgaaaccaaaggatggcaaaatccgcaagaaaagagagagagcaccattaaagatcattatatgaatataatatccagactaaatgtatatttcctcacctttcttctcctcatggatttacaaagcaactgtgtaaaataataactagttggtgaattcttgggcctagaacacataaaaatgtaatgtatgttttatattcacaaataacactgtaaaaacctgagttaactaaatgactaccaaggggaaagcaataattataagaaagtactgttggatgtgcaaccctaagagttgttacacatgaaacgaaacaccccagaaaggcaaacatataatagagctatacaggataaatatgtttttgtttttgtttttttttgagatggagttttgctcttctttcccaggctggagtgcaatgatgcgatctcagctcaccgcaacctctgcctcctgggttcaagcaattctcctgcctcagcctcccaagtagctgggattacaggcatgcgccatcaagcccagctaatttttgtatttttagtagagacggggtattaccatgttggtcaggctggtcccgaactcctgacctctgatgatccacccgcctcggcctccaaaagtgctgggattacaggcgtgagccaccgcgtctggtggataaatatgttttttacatcactggaatttatccataaatcactggaaaactgcccaattgtgatattatcatttacatgataaacattcgattaatcactacaaaatctcacaacaagtataacaaaaaatagatcatcccctacatcgcgaagacatattatgtgaaatcagaatttactgtccttccttagttaaacattgactctacatccattccataagatcatggccccaagatttcctgcattcatccaacttggaaatttccatgttatatcacttatttctttttctttttttttttttgagacgaagtcttgctcttgtcgcccaggctggagtgcaatggtgtgatctcagctcactgcaacctctgcctcccaggttaaagcaattctcctgcctcagcctctcgagtagctgggattacagacacctgccacgacgcccggctaatttttgaatttttagtagggatggggtttcaccatgttggtcaggctggtctcaaactcctgacctcaggcgatccgcccacctcagcctcccaaagtgctgggattacaggcatgagccaccgtgcctggcccaaactttttattagcatagatttgcagttaagttttgaaatccagaagttagagcctactaacctagttcttgtttttcaagactgttttgtctattcagaggcccttgagatgccaaatgtaaaaaatgaaaaaatggggaaaaatggttcctagaaataaatcaagaggtcaaaactataactaaaaggacagcagagagtaaaaagtgctattattcaatgagaagtaagaatcttagattcttagaaaaggggcatttaactttggaaagtaggctcagtaagaacaaactaagcattcgcacacaaaaacagaaaaacagaaagaaaatgaagttcctggaagtgttagagctgctcctataatggtgaaaatgatccttctggatcatgataaactgaatataaggaatgagaaagcattaagagtgtggctagaggacatgtcacagaaccacatctctattgatagtaaaatgatacatgaaaaaaattagcctctgtaagcaccacagtgagacagttgagaagagcgagaggaaggagtttcaggcccatgaaatctagctgggtcagctaggtaaagcactacagacacgagaacttaaggaccacaggagaattgccactgggtggtgacaaggtgggaggatctcttgagcccaggagttcaacaccagcctgggtaacagcaagactccatctctacaaaaaaatttaaaattagctgggtgtggtgatatgcacctgtagtcctagctactcaggagattgaggtaggaggactgcttgacctgaagagttgaggctgcagtgagctatgatcatgccactacactccagcctgggcaacagagcgagatcatgtctctttaaaaaaaaaaaacccaaggcgcggtgccccgtggctcatgctggtaattccagcactttgggaggccgaggcgggcagatcacgaggtcaggagatcgagaccatcctgcctaacatggtgaaaccccgtctctactaaaaatacaaaaaaaaattagccgggcatggtggcgggcgcctgtagtcccagctactcaggaggctgaggcaggagaatggcgtgaacctgggaggcggaggttgcagtgagccgagatcgcgccactgcaatgcagcctgggtgacagagcgacactccgtctcaaaaaaaaaaaaaaaaaaatcccaaaagagttaatgaaactcataaaaaacagactaccttccagagcaagtcctccatcataatgaattgggcatgttctgaaagatgatgcccaatagtcccttcatccaaaagagtgtgaaccagggcgcggtggctcacgcctgtaatctcagcactttgggaggccaagtcgggtagatacctgaggtcaggagttcaagaccagcctggccaacatggtgaaaccccatctctacaaaaatacaaaaattagccagacgtggtggcaggcgcctgtaatcccagctactcgggaggctgaggcggaagttgcagtgagccgagattgtgccattgcactccagcttgggtgacagagcaagactccatctcaaaaaacaaacaaacaaacagtgtcaagcaatccctggggttcaagaccaggaaagatcaccttactctggtgctatgtggcaatgcatcgggtcacaagaataagccagccttatctactgagcaaacaatcactagattctctaaaacaaaagcaaaactttgttgcctgtgtgccagcaagaacacaagaagacttgaatctaccaatgcttcattcctgaagtgaaaaactaccttgaagaaaagggaatgccactcaagagcctcctcataattgacaatgctcctggccatctctttatgctgataaaaaatgtggaggtgatgttcctgcctcctaaaactacatcactgctacaaccacttaatcaaggcatcaggaagattaaggtgactttcacctttctcacctgtaggcggattcatgttgtcttttaatttttttagagatggaatctatgttgctcaggctggtctcaaactcctgggctcaagagattctcttgccttggcctcccaaagcactgggattacaggggtaagccactgctcctggcccaaactcatgttgtcctgatgctacccatgactgtaccatagtggatttatggaaagagcttcacaactgcagatgccattgtgcatatgacagagggtgtagatgtcctaaaggtcaagacagccaaagcatgctggaagccattatggagtgtgggagtcaacgatttcagggtcttctcgggtattgatacggtaggcaggaatatcccaaatgttacaaggcaagttggtggggaagattatctctgactggactgaagacaatgttgaggaaagcatagaagagcatacagaaatccttactaacaaggaactcgaagatatgctgaaatcctctccagataaggacgatgatgatgccgaacacgtagaagaggttgtccagagatgtggacacttgaaaaatttgcagcagtttttggggcatctacagcctctgcaaggtgcaagtattaaagattaccatcctcaagtcagatccttccatggaagaaagcctccatttcacctgagggataacatgccaacaaacactgcaaggattttttgatgatttaaaggaaaagaagaaccggctttctacaacgctgtttctaactaaatatctgcaaatatgaagacagacccttcaatgcttacagatctttggccctcaaattgaacagatcctgacattagtactatttagcctcctccaagtgtcaacatctgcaatcagaacctggttcttccaacacaaatgattgtccagacatcctgtcaagattcaagttagcctgatgtctcactgcttatctattatgccacacatctagtcacctctacacgtaatattagtcaccatacagcaatcagcattatcataatcattatacttgggtaatcaagcaagaaggattagaattttggtattaacatgctcttgaagaaaattaaacaaaagcaatctgccagtgttgaacaacaacaacaaaaaaaactataatgttataggtgacatgtactatgcaggtaggcctgcaatggttgggtctgtccagaacatgtatagacttctatcatgattccctaaataatacaataaaacaactatttacatagtttttacaatgcatgaggtatttaatccagagatgacttagagtgtacagggagatgtgggtagataacatgcaaatatgtaattttataaaagaaacttggcatgtgtggatttaggtatgatcagggactgctggaattaatcccctgcatatgtcaggggaaaactgtatttgaaataaactgaaatcacttaagccttcaccacatggtttacattcatagagtttatttctttttctttttttttattttttttgagatggagtctcactctgttgccaggctggagtgcagtggcgccatctcagctcactgcaatctccgtctcctgtgttcgagccattcccctgcctcagcctccagagtagctgggactacaggtgcgcaccaccatgcctggctaagtttttgtattttagtagagacagggtttcaccatgttggccaggatggtcttgatctcctgacctcgtgatccgcccacctcggcctcccaaagtgttagggattacaggcatgagccaccgtgcccaagccatagagtttatttccaatgtgatttgtttaattttctcaggtaaaataaaattaatgaatgctttcccacattccacacatttatagagtatctttccaatgagtccttttgtgtctgtgcaaggagctgagagaactcaatgcttttccacattccttacattcacatagcttctttgcggtatgagttctttcatgtccttgaaggaaacgggaatgagtgaaggctttaccacattgtttaccttcataaggtttctctcgagtgtgaattctttcatgttgtagaaggcaagtgagccaagagaatgctttcctgcattccttacattcatacggcttctctccagtgtgaatcctttcatgttgctttaagtgaccaaaatgactgaaggcttttctacatgtttgacactcataaggtttttctgctgtatgatttttttatgaagagaaaggtactggaaacaaccaaatgctttcccacattatttacattcatatggcttctctcccatatgagttgtctcatgattttgaagggaataaagatcactaaaggctttcccacatttacatttatagattttctccctagtgtgagtcctttcatgtctttgaaatccaatgaaataaacaaaggctttcccacatatcttgcattttgtgaggtccatctccagtgtgcattgtcatgtgtcttcgaaagcttgagctatgagataacgctttcccacactgcttgcattcatagagtttcttctctccagtgtgagttctttcatgactttgcagtgtactggaacaatcaaagcctttcccacatatcttacatttatgaggtccatctctagtgtgccttatcatgtgtctttggaagcttcccagatgatcaaatgctttcccacattgcttacattcatggggtttctctgcactgtgagtggtttcacgtctttgaagggaagtggaagcactgaaggctttcccacattgtttacatgtacagagtttctctccagtgtgagttttttcatgtcttagacaagaactgtaatcagggaaggctttagaacactgcttacattcatacagtttctccccagtacgtgttctttcatgtcttagataagaactgtaaaaatgaaaggctttagaacactgcttacattcatatagtttctctccagagtgagttctttcatgcatacgaaataaactgggccagaaaaatgctttcccacacaacttacatttataaggtccatctccatgctgcactgccatgtgtctttgaaggtttcccaaagaattgaaggacttcctacattccttacaatcatatggtttgtgtcctgtgtgagaaattttgtgggtttgaaacgagtggcaataactgaaggttttccaaaattgtttacgtgtattacgcttctctccatattcctgatactcatgtggtttgtgcccagcatcaactctgatgtggcaatgaagggatgaaagacccgtgacgacttctccactcattgttttcacgtggacctactccaggaggcatgtgcttgttcacaacagtatctccaatctggctagatgtttctccacaatgactactgtctttactttcaccgaagcgctctaccatatcgcatctgtaaaaaatgggaagtatattactaaaggtttgtttataaatgattttatatgtattaataggtattagatgtactttttttttttttgagatggagtttcactcttgttgccctgactggagtgcaatggtgtgatcttggctcaccgcaacctccacctcccaggttcaagcaattgtcctgcctcagactcccaagtagctgggattacaggtatgtgccaccacgccaggctaattttgtatttttagtaaagacggagtttctccatgttggtcaggctggtctcgaactcctgacctcaggtgatctgcccaactcggcctcccagagtgctgggattacaggtgtgagccactgtgcccagcctagatgtacatttttaacattatcatgcaaagcacaggcttcaggtgacgcctgcttaaatgtgaatgcactgaatgttgtgcaagataacttgaccccaagtgctttctcaatgatgatattcgtatggggattctttttctttttttttttttgagacagagtctcgctctatcgcccaggctggagtgcagtgatgccatctctgctcactgcaacctctgtctcccaggttcaagcgattctcctgcctcagcctcccaagcagctgggactacaggcacacaccaccatgcccagctattttttgtatttttagtagaaacagggtttcaccatgttggccaggctggtctcaatctcttgacctcgtgatctgcccacctcagcctcccaaagtgctgggattacaggtgtgagccaccacgcctggccaaaggtttgtttataaatgattttacatgtattaataggtattagatgtacatttttaacattatcatgcaaagcacaggcttcatgtgaagcctgcttgaacgtgaatggactgaatgctatgcaaggtaactaaatggcaggtgctttcccaataataatattcatatggggattcttaacattgcttccatggaacttattatgcaaacacttgaatagctatgaaaccattaagtatatgcttttggagaaaattttctaagaataaataaatttaagctgggtttgttcattttctttgcttctttgtaaaatttcctatcatttgaagaatgactccagaggcatatctttctcttgtgattgcaaattaccttacatttatcctgtgactttcgtattgatcttccctgatctggtcttctcatttcattcctaaagggtagacccagaaaaaatttttacaaaattatagaaaaactgtaagatattatatatagtgcaatcatgcaggattcattcaccaaactacagtggactcttgtaaacagttttgaattgctcaagtccatttatatgcaaaatttcttcagtttctgctatccctgagatagcaagaccagtctctcttactcagcctactcaatgtgaagacaataaggatgagaacctttatgaacatctacttccacttaatgaatagtaactacagtttctcttccttatgatcttcgtatcaccattttgttttcttttcttttcttttctttttttttttttttgagacagagtctcgctctgtcacccaggctggagtacagtggtgcgatctgggctcactgcaaactccgcctaccaggttaaacgaattattgtgcctcagcctcccaagtagctgagattacaggcacgtgccaccatgcccagcttatttttttgtatttttagtagagatggggtttcgccatgttcgctgggctggtcttgaactcctggcctcaagtgatccgcctgcctcagcctcccaaatgctataggcatgagccaccgtgcctggcccatattgccattttctttctttagcttatgtcattgtgagaaatatataacatatatgacatacagtgtatgtattaatcaactgcttatgtgaccgataagggtgccagtgaacattaggttaaactgtggtggaaaaaagttatatcaggatgtacaattgcttggggggctgacacccctaaaccctgtgttattccatggtcaaccagaccccctttccatattccaaatcttcaacagcattgcacatcaagaagcaaatgtccctaattgactaagtggagatacgacatcatccttacctacacagtccaggttcctgatggtttcctgcatcacatcttcgtagagattcttctggcaaggacccagcaaagcccactcttcctgggtgaagttcacagccacatcctcaaaggcaactgagtcctgaaacatcccacatatgtagatgagggaagcagagactgacagtactgagaatctacacttacctcttaaatttccagggtgcgtggtttccttcttttttttttaggtggagtctcactctgtcgcccaggctggagtggagtggcgctatcttggctcactgcaagctccgcctcccgagttcacgccattctcctgcctcagcctctcgagtagctgggactacagggcctgccaccacgcccagctaattttttgtatttttagtagagacgggatttcaccatgttagccaggatggtctcgatctcctgaccttgtgatccacctgcctcagcctccaaaagtgctgggattacaggtgtgagccactgcacctggctagggtgtgtggtttctaagcgtgacatggtaaatccactttcattttctgtctacactcactgtctcccacatggcaattctgatgctacaattaaatgtttgctaaggcaacaattgaattgggacgggtctcctgttggtaagtgaagtcagtattattacatggaccttcatggctatttctacagtggatctgcagttcttatcaggacaaagtcctactctttattgtgcaaaagagttaacattagcagtcctgagactacatatcctcacaaatgcttgtttacaatgttggaccttttatggtgtctaggcactggatttagggagggtccccaccaatgtggctagtaaaagggactgagtgtacctaaactatttatgcaaaataataaggcatttgcttagttcctatattcctctgagaactggaattctatttcatgctcagcagaggaagtgcacctgatcagccactgctaggtttgaatgtctgtcccctccaaaacacatgttgaaagttaatctccaatgtgaaagtaataaaaggtggggctttaagaggtgattgggtcctgagggtttggacttcataaacagattaatccataatggctgagtgaataaatgggttatctcaggagtaacactgtggtcatgtcatgagaggaagaaaagatctgagctagaggctcaatcccctcactatgtgatactctgtgctacctagggactctgtagagtccccaccagcaggaaggttctcaccagattcccagccttgacctgagacttcacagtctccagaactgtaaaaactaagtatgatttcttatcaattgcccaggttcacttattctgttataagcaaaaaaaacaagagaaagacagtcatgaggaaacactctgagcactgagtctaatgaacacccctggtagattacatttcatattctttgttgcaacttgtgattagggggatctggcccagcctatgtgcgattacagtaagagaatatttggaagctggcaactggtttccactagatcaaatgcagtaaagtaggacaaaagactaataaaatatacttcacaatcccaagggaaaaatcttaaacttattattaggtaatgtcaaaagagaaggaaagaaacggtggattgcacatgttcttagaaataactcaaagtcatctcttatgaatatgtataatattccataaatccctaaagcagacctttagtagtcaacaaaaatgacattaccaaatctaagtcaaaaatgtctaaaaatgcttaaaacttctcattaaatgacagcattataaaaacagataaaggattcttaagttataatattcagcaccccataaaattaacagaaagataaagataaataaaaataaaagtgaaaatggaaggaaagccttgtggagtttctgtttgtcctaggcccaatccctccccacctcagtgccagtctctctctctctctatatatatacacacacacacacacacacatatacacatatacacacacatatatatacacatatatatacacatatatatacacatatacacacacacatatatatatatataattttttttttttttttttggagacagagtctcactctgtcgccgaggcgggagtgcagtggtgcgatctcggctcactgcaagcactgtctcccaggttcacgcaattctcctgcctcagcctccccagtagctgggactacaggcactcgccaccatgcccggctaattttttgtatttttagtagagatggggtttcactgtgttagccaggatggtctcgatctcctgccctcgtgatccacccgcctcggcctcccaaagtgctgggattacaggcatgacccaccatgcccagccattaacctcaattctttttttacatatattttactttgtttcagagacagggtctcgctctgtctccagcccaggctggagtgcagtggcatgacctagctcactgcagcctcgaactcctgggctcaagtaatctggtgatctcagcatccctagtagctatgactacaggcatataccaccaagcctagctaaattttccttttttcttttttttttttttttttttttgcatagatgaggtctcaccatgttgctcagactcgtcttgaaatccaggccttggttgggcatggtggcacacacctgaagtcccagctacttgggaggctgaggcaggaggatctgttgagcctaggagttggagatggcaatgagctataatcacaccactgtactccagcctgggcaacaaattgagacccccatttccaggaaggaagggaaaggagaggagggcaggggaggaagaagagaagagaacggaagggaaaggggaaggggaagggaaaggggaagggaaaggggaaggggaaggggaaggggaaggggaaggggaagaaggaaaatccaagcctcaagcaatcctcccaccttggccattcaaagtgctgccataacaggcatgagcgaccatgcacattccactttcatttttgaggatccactctcataatctaacctaatccttatcatgtctcaaaaaaaccattgcctaatactgccacatcagggaagtggaaaaataaataaaattttataaggacataaacatttattccacaataagtgatttattagtagctttttatcattttctaaatactcatgttaatcccttatcagatatataatttggaaatggtttctcccattctatgggttactcatttactctgttaatattgcattttgatgccaaaggtccacaaactccaaattatttttttcccttgtgggtcatgcttttggtgccaaatctaggaaatcactgccaaattcactgtaatacagcttttgccatgtattttcatctaacagttatacagctaagatggacactcacgtatttcattcattttaacttctgtacatgttaggtatgggtacaacgtcatcctgttgcatgtggatgtgcattgcccaacagcatcattctacagaaacactaagctatcccccatcgaatagtcacagcagacttttcagaaattgttagactttatgtaaattattagactttattagactttctgtgttatcttgttgcattgtctatttctgcgttattacgctagtaccaaacagtttttattagtatggatttgtaataagttttgaaatcaggaagtgtgagttcaccaactttgttctggctttttctttttttttttttttttgagacagagtctcgccctgttgcccaggctggagtgcagtggcatgatctcagctcactgcaacctccacctctcaggctcaagtgattcccctgcctcagcctcctgagtagctgggattacaggtatgcgccaccatgcccgattaatttttgtatttttagtagagatgcaatttcaccatgttggtcaggctagtctccaactgctgacctcgtgatccgcctgcctcagcctcccaaagcggcgggattacagaagtgaggcacatctggccattgttctggcttttgaagactgttttgttcattcagagacccttgagatgtcatatgtaaaaaaataaaaaatgttaaaaaatggctcctaagaaggaatcaagtggtcaaacctatccctaaaaggctagcagtggttaaaaagtggtatctctcaataagaaaatacaaacccaagatgttttgaaaagtggtgtatcaccttgaaaatttcatcataaagtaagaacaaaccaagaaaccacacactaaaactgagagaagctgaagttcttgaaggtgttagagcttttgccaccgtagggtggcaaaaatgatccctctggtttatgataaactaaggataaagactaagaaagcattaagtatgtggctagaggacatgtcacagaaccacatccctgctgatggtaacatcatacttgaaaaaacacttagccgggccaagcgcagtggctcactcctgtaatcccagcactttgggaggccaaggcgggtggatcacgaggtcaggagttcgagatcagcctgaccaacatggtgaaacccagtctctactcaaaagacagctgggtgtggtggcgcgcacatgtaatcccagctactcagaaggctgaggcaggagaatcacttgaacccgggaggtgggggttgcagtgagccaagatcacgccactgtactccagcctgggcgacagagcaacactccgtctcaaaaaaaaaaaaaaaaagaaagaaagaaaacaaacaaacaaaaaaacatttagcctctatgagcatcactgtgagggggctgaggagagcaagaggaaggagtttgaagccagtaagttctggctaggctaactatgcaacacagtgcagcccaagaacttgaagaccacaggagaactggcatcggctgaagccacggaaacaacagcattcctagaagagctcataaaacagaaaaaagaaagactatcttccagagtaaatcttctattgtcatgaatcaggcatgttctagaagatgcccaatggtaccttccgtcatgagtgcaggaactagggttcgaggcctggaaagaccaccttattctggtgctgtcaggccatgcattagttcatgagaacaagcgaggcttcatctactgagcaatcaccaggttctttaggacaaaagcaaaacttgctggcctgtgtcctggcaagaacataagaaggctttcttctagcaatgcttcactcctgatgtgatggaatacctcaaagagaagggactgccactcaaggtcttcctcagaattgacaacactccaggccatctctccaatctctttgttttgcctaaaagaacatgcaagtgatatttctgcctcctaaaactacatcactgctgcgtcactagatcaaggcatcatcaagtgcattcaagtgacttacatccacctgaccttggctgatttcttggagtcttgatgctaaccttgaatgtaccacagtggttttattgaagagcttcacaattacaaatacaattgtgcttattgggaaggctacagatgccctaaagcccaggacagccaatgcatgttacaagccatcatggggtaagggagtcaatgatttcaagggcttccccactattaatgcagttattaagaatatgtaaaatgttgctaaaaaagttgatggagaacgctgtctgaaacgactgaggatgacgttaaggaacacaccgaaaagcaaagagaaacccttaccagctaggaacttcaaagtctgctgaaatccactacagatgatgatgagctagaaaacttagaggacacagagccattgatttggacacttgaaaagtttgccacagtttttcagtaggcaaaggtgaaaaagaggtacgatcctcaaagatcctacaatggaacaaagctttcactccacccgagaaataacaacatgcctataaacactgcaagattttttttttaatgaagcaaaggaaaagaagaactagcttcctataactaagcatctgcaaagaagatggaacattcaatggttacagatcttcagccctcaagccaaacagatcctaacattagtattacatagcctcctcaaatgagtccacatctataatcacaagttggttcttccaacatagatgatagtcctgatggcctgtcaagattcaagttaacctgatgtctcactacttacccacaatgccatacatctagtcatctcaacacatcaaaacactgggcaccacagaatcatcatcgttataatcactatacttgggttatcaagagagaagacccagggttttggtaagtgttaacacattaaacaaaagcaatatgtgagagttgaaacaaagaaactttaatgttctggctgactatactatgttgataggctgacaattactgcatctatactgaaaatacatagactcttttccttatcatgagtccctaaacaatacaatagaacaactatttgcatagcttttacaatgcatgaggtattttaagtaatctagacataattgagagtatacaagaggatgtgggtaagttacatacaaatatgtcattttataaaagggactggacatggctcacggagtgctggaaccaatacccagcaggtatcaagggatgactgtactggaaagaaactgaaattacttaaggttttaccaagtgcttacattcacagggtctatctccaatgtgtttcgtacaagtatctgaaatgaaataaaattaataaatgctttcccacattccatacatttagagagaatgctagtgagtctttttatgtctatgcaaggaactgagagaagcaaatgctttcccacattccttacatccatacgggttctctccagtgtgagtttttttccagtgagtctttttatgtctatgcaaggaactgagagaagcaaatgctttcccacattccttacattcatacgggttctctccagtatgagttttttcatgtccttgaagaaaacgggaatgagtgaaggctttaccacattgttgacactcatagggtttctctctcatgtgaattctttcatgtcgtagaaagcaagtgagccaagagaatgctttcccacattccttacattcatacggcttctctccagagtgaattctttcatgtacttttaagttaccaaaatgactgaaggctttcttacatgtgttacactcataaggtttctctcctgtgtgagtccttctatgttgagaaaggtattggaaacaactgaatgctttcccacattccttacactcatatggcttctctccagcatgagttgttttgtgattttgaaaggaatagaaatcaataaaggctttcccacatttgcatttatagggtttctctccagtatgagttgtttcatgccttcgaagagaactggaaatacggtaggctttgccacattgtttacatttatagggtttctctgcagtgtgagtcttttcatgcctttgaaatacactgggataaacaaaggctttcccacatatcttgcatttgtgaggtccatctccagtgtgcattgtcatgtgtcttcgaaagcttgagctatgagataacgctttcccacactgcttgcattcatagagtttctctccagtgtgagttctttcatgacttttcagtgaactaggacaatcaaagccttttccacatatcttacacttatgaggtccatctctcgtgtgcattaccatgtgtctttgaaagcttcccagatgatgaaacgctttcccacattgctgacatgcatagggtttctcatcagtgtgagttgtttcgtgtcttcgaagggaagtggaagcactgaaggctttcccacattgtttacatgtatagggtttctttccagtgtgagttctttcatgtcttagacaagaactgtaatcagggaaggctttagaacactgtttacattcatacagtttctccccagtatgtgttctttcatgtcttagataggaactgtaaaaagaaaaggctttagaacactgcttacattcatatggtttctctccagtgtgcgttctctcatgcatatgtaataaactgggccaaaaaaacgctttcccacacaacttacatttataaggtccatctccacgctgcactgccatgtgtctttgaaggtttcccaaagaactgaaggacttcccacattctttacaattatatggtttctttccagtgtgaagcctctcatgtgtttgaagtgagttgtggtaactgaaggctttcccacgttgtttatgcgtatctggcttctctccacattcatgatactcatatggtttgtgcccagcaccaactctgatgtaacaattaagggatgaatgacccatgatgacttctccactcatacggctttcatatggacctactccaggaagagtgttcttggtcacaatactatcttgaatctggctagatgtttctccacattgagttccatctttactttcaacaaatctctctaacatacgacatctgtaaaaaatgggaaatatatcactaaaagtcggtctataaataattgtataggtattaataagtattggatgtacatttttaacactatcatgcaaagtgcaggcttcgtgtcctgcttgaacgtgaatggatggaatgctgtgcaaggtaactcgacccaggtgttctcaagacaatcacattcatatgtggattcataatattgttgtcatgggaactaatttatgaacactgaacagctatggaacatttaagtatatattttggagaaaattttctaagaataaataaatttaagctaggcttgttcattttctttgcttgtttttaaattttcatatcattctcagaacggctccagggacatatctttctcttgtgagtataaattaccttagatttttcctgggatatctatattgatcttcaatgttctggtctttccatttcattcctaaaaggtatacacagaaaaatcattacaaatttttacaaaattatagacaaacagtaacattttgatgtacactgcaatcgttcaaaatgcattcactgaagtacacctgactcttgaaaaacagaggtttgaactgcacaagtccatttgtatatacatatatatatgaatgttcttcagtctctgctacccaagacactaagaccagcccctcctcttactcagcctactcaatgtgaagacaatgagaatgaaaacctttctgatgatgcacttccacttaatgaacagtaaatacagtttctcttccttatgattatctttttaacactttctgtttctagcttactttactgtgagaatatacgatgtaataatacgacataaaatatatgtattaatcactgcttatgtgactgataatgctgcccatcaatagtaggctaagatgtggacaaaaagttatatgaggatgtacaactgctacaggagctggcacccctaaaccctgtttttttttttccagggccaaccatatcccctttccatattccaaatctttgaacagcacgaatgaccaagaaacaaatgtctccaattaaataagtggaaatgcgatgtcatccttacctacacaatccaggttcctgatggtttcctgcatcacatctttgtagagattcttctgacaaggacccagcaaagcccactcttctcgggtgaagttcacagccacatcctctaaagccactgaggcctgatccatcccacatgtacagaggaggaagggtgaaaatcacagtactgagaatctatactcacttcataaatttcacatgatgctgtggtttccaaccattttattcaatgacatggtaaacccactcttattctctgtctacactcactttctcctacacagtaactctgaagctacagttaaacatgtttggtaaattaacagtgggatagaaacatgccacttgttggcgaactgagtgagtgaatcacatagcctggatcacccctaatgttgatttccacagtgggtctgcagtccttggcacgataaagtcctactacttattgtgcaaaagggagttaccattagcagtgctgagactgtgtgtccttacaaatgctttttcacaaagttgggcttttcatggtatctagacagtgtatttaggggagggccccaggagcgtaactaataataggggtggagtgtgcctaaattgtttacgcaaaaaaaatacagtatttccttaaccccatcttccttctgagagtttggaattttgttacatactcagcacagggagtgcacctgatcagccactgctaggtttgaatggttgtcccctccaaaatgcacactgaatgttaatctccaaagtggcagtaaaaaaaaaaaagtgaggtttaagaggtgatgtagtcctaagggtttggacctcatgaatagattaatccgtaacgggtgaatgaataaatgagctatctcatgtccttctgagaagagtaagagatctgagctagacactcagctccctcaccatgtgatactctatgccgcctagggactctgcagagtccccaccagcaagaaggttctcaccagatgcccagccttaaccttggacttcccagcctccagaaatgtaaaaattaaatactgtttcttataaattaccgaggttcagtaattctgttatgaataacaagaaacaggctaagacagctacaaagaaacactctgggcattgggtctataatgaactttctgggtagataacatttcacgttttgttgcaacttgttatttgggggatttagcccatcctatgtgattatacttacagagaatatttggaagctggcaactagtttcctttagatcaaatgtactgaagtatgacaacagactgagaaaagatattacaccacctcaaaggaaaaattttaaacattttgagtaacgccaaaggggaaagaaagaaggggaaagactgcacatattcttagaaagaactcagtgtcatctctcatgaatatttataatacttactaagaaactaaaacaaatcttttagtagtcaacaaaaattacattaccaaatctaatagaactcacagtatctaaaaaatgctgaaagccttctcaccaagaaagtgcagcattccaaaaacaaataaaggattttatttggcaccccgtactattaacagagagataaatatatatataaagaaaaatgaaaactggtagaaaagtcttgtggagcttttatttgtccttggcccaatccctccccctatcaataccagtcttgaacacagcagcctgagttcccggtatagaaccctggacactaattctagagacagcatatcagatcttatttgcaaattattgccttgcattttccaatctgtataaggactatcccgaggtctgaaacaaagctgtctttttttttttttttttttgagacggagtcttgctctgtcacccagactggagtgcagccacacaaccttggctcactacaacctgactcccgggttcaagttattccacccagcctcagcctcctgagtagctgggagtacaggcatgctccaccacatccggccaacttttgtatttttactagagacggggtttcaccctgttggccaggctggtctcaaactcctgacctcaaatgatccgcctgccttagcctcccaaagtgctaggattacaggtgtgagccacagtgcccagccaaggccctctcttctactttatctacaatacaacacgatcagggtccaatttggcaggaactgcatgaaaatgttgcaaaatacacaaaaagcctgtagccaactggaagaacagactatgattaagacatacagtagaccaactaagtcatggagaaaaagagctgaagagaaaatgtcctccagatatcagggtactcaaaagcacccaggtatcctggggaattgagaaagccccatgcatgcacagtaaagaacacattttcacaaaagacaccggagaagaaaccctcattttcacttctggctgatctgtagctttaagtaagcagaacataaagcataagtagagtattaaacagcctggctaagtgttcaagggatgccccaggcacagagccatccacaaagactggaagaggtcaggcttttgtatgctttatcttttttactagcttctagcattcaggaaatctctgccagaacactggatgaacacacactaaagaacagagatgtcagtttctacaacaaataaggaatacagtctgtgcaaacatactttgaaaatgttattaaacaaatgaacaattacagtcttcaacacacataaacagaaaacagtgaggaaagaagaagaatccaattttcagaattaccccattataacattgagatgtctacttttcaacacaaaattatgaagaatacagaaaaacatgaaaatatggttcatcaattggaaaaaatataattgagataagccatctctgagaaacctcagacactgcactcactgaataaaaacgttaaaacaactatcttaaatatgttcaatgaagtaaaggcaatgatgaacaaataactaaaagaaaaccagaatacagatatagagataaaataatatctattaaaaagtagaaattaactgggcgtggtggctcacgcctgtaatcccagcactttgggaggccaaggtgtgtggatcacctgaggccaggagtttgagaccagcctggccaatgtggtgaaaccctatctctactaaacatacaaaattagctgggcatggtggtgcacgcctgtaatcccagctacttgggaggctgaggcagaagaatcgcttgaacccaggacgtggaggttgcagtgagctgagatcatgccactgcacttcagcctgggcaacaagagcgaacctctgtctcaaaaaaaaaggggtagaaatttagccatatagaatttatgcagctgcagggtacaactaaaatgaagacatcatcacaagtgttcaaaagatgtgagcagccaaaaaaaaaaaatcagttaaaatgatgataaaccaattgaaattaatctaatggggaaaaaaaaaggaatgaaattgagagaatgtgttactggtgtacttgtcttgccaataatgttaaaagaagttcatcagagagaagaaaaatgatacaggttagaaactcagatcatacacacacacacacaaacacacaaatatatacatatgcatatatatgaagagcattagaaaataattcaatgaaggcacaaaaattatttccttttcttattcctattggatatcataaaggtttgttcaaaaaataatatcaacaatgtattgggtggttatagtttataatagggcaaatggatgacggtgatgttaaattgggtgggagggaggaatgctgaacactgggttatataagcattaccccaaaagccagtacagtgttacttaaaactgaaggtccatttgttgtgaatggtttactccaaatgctagggaaatcaataataaaatgttaagaaacaacagcctgtcacagtggctcacccctgtaatgccaacactttgagatgcaagacaggaggactgcttaagatcaagactttgagtccacactcggcaacacaatgagactctgtctctaggaaacgtgtaaaaaaaaaaaaaaattagccaggcgtggtggcctgcacctgtagtcccagctactcaggaaagcaagtagggaggatctcctgagcccaggagttggaggttatagttaactatgattgctccactgcactctagcctaggtgatagagcaagaccctgtctcaaaaaaaaaaaaaaaaagaaagaaagaaagaaacaaagaaacaagtagacttaccatactattagaagaaaatacaatcatatagactcctcagttaaaataaaaggagacagaaaaaggaagttgaaaaaaaccgacaagtataacaaatgtaaaacaattatatatgtacatatgaatccaggtatatcaataaccactttaaatgtgtattatatgaatataccaataaaagaagacaaggactgacacagtagaaaaaaaacaagatccaccaatgtgtgcaagaaaactatttttttattctctcaagaaaactattttaagtagaaagacacaggtacattaaatataaaggtatgaaaaaatatactccattctagccctaatcaaaagccatatggggctgggcatggtggctcatgcctataatcccagcactttaggaggccaaagctggtggattgcctgaggtcaggagttggagaccagcctggccaatatggcgaaactgtctccactaaaaatacgaaagaaaaaaaaaattagccaggcatggcggcacgcacctgtagtcccagctactcgggaggctgaggcaggagaatcgcttgaacgcaggaggcggaggttgcagtgagctgagatcgtgccactgcactccagcctggacaacagagtgagacgctgtctcaaaaaaaaaaaaaaaaaaaaaaaattggtcttagctggaggtgggggcattggcctcaggcctctctgccatagtcaaagctactctcttacccttctatgctttacatggatatttaaaaacaaaatactcatgtttgatgaatccaggaaaatcactcaaattcagtgtttatgtctatgggtgggaaggaaattgtaaggcactgatattttatacctcaacaggaaaagcccaaatacctatcccttccagacaatgaatgtcatttaattactatttccatgatagtaagtgatacagttaaaaataattatattttacttctttagctgttggaaagtcctgtcccacagaatttagcattcatctgtcaaacccatataacaggaacagaacagatttctccattgtcccaaaatctccacccttttaaaaaggagaactgaacttttgttaaatccttttaattcaatgtacctactacactttcttgtaaaaatgtattccttttttgcagccataatggaagagggttttttccttggtagtagttatactactaagtcctgaaattccatctgaaatcatccaaaaaacaaacacacctgagaaacatactacacaagctctggggcaaaaaaaataaataaaggtttttaaaaaatggaatagaagattacatataccatttatattctgaaatccaactctttctagaattacttatacaatttattttctgaagtccaactctttccaactttgggtatactttgtcttcaaagtatacaataacaatctctaatcataggatgtattttaaggttaatcaaaaatttaggctgaaaagagtaaacatatcttttcaagctaacaaactcaggaatcagcagtgctgactggaacacagaaaagtctaatgcaacaatcagggtgggtcatcctatcacctgggacatcccttaaccctattctggtcatcaccctcccaggagacactgccttgtgtgcttttcaggatcttgcactacctcaacgggcaggttctccagtccttagatataactttctaccttttaagtctgagagagtccagaaggcaaaaatcatttctgtttttttttcctatggaatatgaccatgaaattggctgttcagtcatgtgtctccaaggaatggaaactagggttgggaagaaaaggtgagtgtcccaggagttagctttttacaggaattatataccagaagattcctcccatcccagtggatccagttgctccccagggggccacaccccccatctcaggctgtcccctgggaggagtgacccaggggatgatattcactagaccctccaagagacttggcagctgtggacacccttttttttttttttttttgagacagggtcggcctctgttgcctaggctgggatgcagaggcacgatcatagctcactgcaacttcaaactcctgggctccagccatcatcccacctcagcctcaggagtagctgcgactacaggtgccagctaccaagcccagctaattttattattatcatttatactagagacaaggtcttgccatgttgcccaggctggtctggaactactaagattaagcaatacctctgccttagcctcccaaggtgctggaattacaggaatgacccaccgtgttcaggaacccaaaataattctttcaagaaaaagccatacattgctagctgaaaacaagatgacaaactagtgaaatatcgcctgggggccaaacagttcataccgttgctgtgaattaaggacagaaggttagcctggggaagtctctggaaaccaagagatttgctgccagccctaggaggagtcaggatgagagaacacagtggtggatttgagaccctgctaaccacatctttggaagactcagaggggaaacggtcgcccttggaaagaaagaagggactgaggaccacggagaccacagctcctcccacacacaaaccccacacacgagtctggattccacctggtgactcgtcgtcaccgtgcagcctcctcaccgggttcacaggaactgcgagccaggctggaggcgagattgcagttagatattaaccaggtgccctcagccccgctgcctcaaggggccgcctccctgagagtcaggtcacagcagacgctgaccgccggcttccccattgtgcctggggataagatctctgagaactgctcaagagtcgccggagttctcagatcctgaatcccagcaaaggctggcgccaatcaggttgaagtcccaacgagggagcccattcagcagaatgcggtttcttcacctcctgtcccaggattcacccctcacttccccaccaaccaacgaccctacacccagccgcccccgtccagaccccaaatccctcagggaggcggatctggggtgtcctcccctctctggctattaaactgtttctgctgcagccctcagcgtctcggtgcagtgagtcgggccgcgaacctgtgttgcttacagccgcacaatctcgggagacgcgaggctgcgggcgcggagctgcccagagagggcgccggggccgcagtcgccgcgcaggaacgggacaggacgcccggggtcccggctgcatgcccagccccaccctgcggccgagggccgacctacgccaggggaacccgggtccgtagatcccggagtagcccttggggaggcccgggtccagccacagccgattactgcaggttccacccagcccctcccccgcctcgggacgccggcccagcacacgcaccatttcccgacttccgcggtgtcccaggtcctccggacggctcccgctgccaatgcgggttcccgcgggacacaggctgccacggaacttccaggtcgtctcttagctacagagccgagcaccgagcgcccagcgcaggtgggtggagaagacgccgcgggctttttcaaccacacactcctctgggaagcgcgcctgattgacagttcccacgaacccgccccacggcccttactggatacggcgtcaggtgccgcccctcgtggactgattgacagaagaagcgatcttgcacagctgagtggagccagatgagcaagttcctgacacagcccttggcagggcgggcttcctccctgctctttgatctgaatcctcccgagggatatttgcacttaagcggaatttcctgcctgtactcaataggacctcctgcttcttcctcctgtacactgactgacaaaacaattatacttttttttttttttttttttttttttccgagagagagagagagagagagagagagagagggagtcttgctccgtggctcaggctagagtgcaatggtgcgaggctcactgcgacctccgcctcctaggtgggttcaaacaattctgcctcagcctcccgagtagctgggattacaggtgcgcgccaccacacccggctaatttttgtatgttttagtagaggccgggtttcaccatgttggccaggctggtctcgaactcctgacctcgtgatccgcccaccttggcctcccaaagttctgggattagagacgtgagccatcgcgcctggctccaattatactctttttcaatgaaatttttcaaaatatttcaatgtacaattaaattattttttactatagtcactctgttgtgctagcaaatactaggtcttattcattctttgtaactattttttatacctattaaccatccccacttcccccataactactcctcgctactacttttcccagcctgtggtaaccatccttctacacgtttttggttgtttgagatggggtcttgctctgttgcctaggctggagtgcagtggggccatcatggctcactgcaacctctacctcccaagctcaagcaatcctcccacctcagcctctcaagtagcttcagattgttcactgttggcatataaaaatgttactgatttttgtatgttaatattgtatcctgcaactttactgaatttatttctcagttctaatacttttttggtggagtctttaggtatttccagatataagatcatattatatgcaaaccaggataatttgacttcttcctttccttcccaatatagatgccctttatttctttttttttttttttttggacttattgctctagctgggacttcgagtactgtgctgaacaacagtggtaaaagtgggcattcttattgtgttccagatcttacaggaaaggctttcagtttttcctcattcattatcatgctagctgtgggtctgccatatatggcttttattatgttaaggtagctgcttctatacccagtttttttttagggtttttatcatgaagggatgttaaatattatcaaaagctttttcagtgcacattgaaatgattatatggtgtttgccctttattctgttgaaatgatacatcacattgattgatttgcatatattgaaccatccttgcatcccagggataaagcccacttggtcatgatgaatgatctttttggtgtattgttaaattcagtttgctagtattgagttgaggatttttgcatcaatattcatcagtgacactggcctatagttttctttttctgacatgtctttgtctggttttggtgtcaaagtaatattggctttgtaaaataagtttggaagtattgccttctcctctgttttggaatagtttgagtaggattggtattagttcttttttaaatgttagtagaattcagcagtgaagccactgggttctggggttttctttgctagcagactttttattatggctttgatctcattatttgttattggtctgttcaggttttttatttcttcatggttcaatgttgctatgttctatctgcctaggaatttatcaatttcttctaggttttccaatttattggcatatagttgttcttagttgcattaatgatcctttgaatttctgcagtatcaactgtaatgtctcctttttcatctctaattttatttatttgggcctttctgtttttttcttagtctacctcaaggtttgtcagttttgtttgtcttttcaaaaaaccaactttttgtttcattgttcttttctattgtttcttcatttcaaattcatttatttctactctgatttttattatttcttttctactaattttgggtttggtttgctcttgcttttctaattctttaaaatgcattcttaggttgtttatttgaaggttttcttcttcttcttcttcttctttttttttttgatgtgagttttacttcactcttgcagcctaggctggagtgcaatggcgcaatctcagctcactgccacctctgcctcctgggttcaagcaattctcctgcctcagcctcccaggtagctgagattacaggcacccaccaccatgtctggttaattttttgtatttttagtagacagggttccaccatgttggccaggctggtcttgaactcctaagctcaggtgatccactcacctcggcctcccaaagtgctgggattacaggtgggagccaccgcacccagcctgcaggtcttcttcttttttgatgtaggtgcttatatctataaacttccctcttagtactgcttttgctgtattccataggttttggtatgttgcattttcattatcatttgtttcaagcaactttacaatttccttcttaatttctccactgaccaattggtcattcagaagcagattatttaatttccatatgtttgtatggtttccagaattcctcttgtcattgatttctagtttattccatgtattctatgacacaatttaaattatttcaatttttttggagagttttaagacatgctttttgaactaacatatggtctatccttgagaatgatgcatgtgctcgggaaaaatatgtgtattctgtagctgttggataaaatgttctgtaaatatctattagatccatttgatctatagtgtagattaaatcccatttaatctttcttttgtctgatttttcagtatatattgagataatctttgtcgatttactgtctggaagatctgtcctgtgctgaaaacggggtgttaaaatctccagctattattgtattggtctctctctcttttatttttatttttatttttttttgagacagagtttcactcttgttgcccacgctggagcgcaatgttgcaatcttggcttactgtagcctcctccacctcccaggttcaagcagttctcctgcctgctgggattacaggcgtgagccaccatgcccggccctcagtgccagtcttaaagacagcagcccgagatcccagtataaaatcctactcactcaattatcacctttgtattttcgaattggtatggggactttccaaaggtctgaaacaaggctctctgttctatatcatctacaataactcagtccctgtcaaatttggcaggaattgcctaaaaatgttgtaaaatacatcaaaagcctgcaaccacctggtaaaacggattatgattatgacataccatctctgatggttaatactgagtgtcaacttgattggattgaaggatacaaagtattgatcctgggtgcctctgtgagggtgctgccaaaagagattaacatttgagtccctgggctggggaagacagatccaccattaatctggtgggcacaatctaatcagctgccagcgaatataaagcaggcagaaaaacatgaaaaggagagactggcctagcctcccagcctacatctttctcccatgctggatgcttcctgccctcgaacatcagactccaagttcttcagttttggggcttggactggctctccttgctcctcagtttgcagacagcctattgtgggaccttgtgattgtctaagttaatatttaataaactcccatttatatatatatatatatcctattagttctgtccctccagagaaccctgactaatacaccatctaaatcctgggggaaaaaagttggagagaaaatttcctctagtaaactagggtactcaaaagcactcaggtatactggggaattgagaaagccccatgcatgcacaggaaagaacacattttcacaaaacacatgataaaaccctaattttcagctctggctgatccctaggtttaattaaacagaaaataaatgctaaagtaggattttaaacagcctgactgtgttttcaaggaatgccccagtacagagccatccacaaagactgaaagaggtaaggtttttgtttgtttcatcttcttctttacttttagcttctaacattccagaaatctgtcagaacactgaatgaacacagaggaatagacatcagtgtctacaatgaatagggactacagtctctgcaaacacagtttgaaaatgttactaaacaaattacagccttcaacaaacataaatagcaaagagtaagcataattttgttttgatacaaacaaaattatgaagaatacagagaaacatgaaaatgtggctcattgatggaaaaagtttaattgacatagttcatctctgagaaacctgacactggacttactgaattaaaactttagagccgagcgcgatggctcatacctgtaatcccagcactttgggaggccgaggggggcagatcacaaggtcaagcgattgagatcatcctggccaacacggtgaaaccccatctctactaaaaatacaaaaattagctgggtgtagtggcatgcgcctgtatacccagctactcgggaggctgaggcagaatcgcttgaacccgggaagcggaggttgcagtgagccaagattacgccactgcactaatgtctggtgacagagttggactctgtctcaaaaaaaaaaaaaaaaagaaaaaaaaaaaggcccggcgcggtggctcacgcctgtaatcccagaactttgggaagccgaggcaggcggatcacgaggtcaggaaatcgagaccattctggctaacacggtgaaaccccatctctactaaaaatacaaaaaaaaaaaatagccgggcatggtggcaggcgcctgtagtcccagctacttgggaggctgaggcaggagaatggcgtgaacctgggaggcggagcttgcagtgagccgagatcgcgccactggactccagcctgggcaacagagtgagactccgtctcaaaaaaaaaaaaccaaaaaactttaaaataaccgtctcaaatatgttcaacaaggtaaaagcaatgatgaataaagaactaaaagaaaaccagaaaacagatgtagggataaaataatattaattaaaaagtagaggcctggcgcggtggctcatgcctgtaatcccagtactttgggaggccaaagtgggcgaatcacgaggtcaggagatcgagaccatcctggctagcatgatgaaaccccgtctctactaaaaatacaaaaaattagctggacatggtggcgggcgcctgtagtcccagctactggggaggctgaggcaggagaatggcgtgaaccccggaggcggagcttgcagtgagcggagatcgcgtcactgcactccagcctgggcgacaaagcgagacttcttctcaaaaaaaataaaattaaattaaaaaagtagatattgagccatatagcatttatgcaggtgcaagatacgacaactaaaatgaaaacatcactacaggtgttcaacagttgtgactaactaaagaaaaacatctaaaatgaagacaaaacaactaaaattacccagtctgagagaggaaaaaaggaacaaggatgagagaatgtgtgactggtatacctgccttgccagtaatgtcaaaagaagttcatcagagtgaagaaaaaggatacaagttagaaatttgggctggctcagtggctcatgcctataattccggcactttggaagacccaaatggtaggattgctggagcccaggagttcaaggccagcctgggcaacatggtgaaactccatctctataaaaaataaaaaattagccaggcatggtggtgcacatctgtgatacaggctacttggaaggctaagacaggaggttaacttcagcccaggagatggaggctgcagttagctatattcctgtcactgcactccagcctgagtaacaaagcaagaccctatctaaaaaaaaaaagagagagagagagaaaaaaaaagaactagaacaaattctggtcacacacacacaaacatatatacacaaatacatacaaacatacatatgcaaactacataaaatatatgaaaagaattaaatgaaggcacaagaaaactctttccttttctagttcctatctgatgtaatagatgtttgttcaaactaataatatcaacaatgtattgggtagtttagcttataatagggccaatgaatgacagtgatgttatctgggatacgagggaggaatttggaacactctgttatacaggcactataccagaagccagtatgatgctttgtaaaactaaaggtccattcattgtgaatggaatactcaaactctagggaatttactggtaaaatttaagaaacaatagctagttgggtagctcatgtgtgtaatcccaggacctttaggaggccaaggtgggaggattacttgagcccagaagttcaagaccagcatcagcaacatagtgaaaccctgtctctataaaaattttaaaaatatcttgggcatggtggcacaaactgtagtcacagctactcgggaggctgaggcagtgggatcttgagcccaggagtttgagatcacagtcagctatgattgtgccactgcactccagcatgtatgagagaccctgtctcaaaaacaaaaaagattctgtctcaaaagaaaagaaaagaaaagaaaatgaaacaagtagtatagtataataagtctacttactctacttccattttcataaaatttcatttcacatagtaatagatttactatactaatagaagaaagaaagaaaatggaatcatattaaatgctcagttggaaggaaaggaggcagaaaaaaagaagttgaaaaaacagacaaacataacacaattacatatgtacgtagtaatccaactatatcaattgccatttaaacatgtattatctatagataccaatataaaacaaagattgatagagtagaaggaaaaaacaagacccatgaatgtataaagaaaactattttaaatagaaagacacagatacattaaatacaatggtataaagaaatatatgccattttagccctaatcaaaaggaatatggaacaggctacattagactcagataaatcaggttgtagatcaaggaaaattacaagagatagagatatttcataatgataaagtgctcaatcctagagacataataatccttgatatgtatgtccagaaaatagagcatcaaaatgcataaggtggctgggtgtggtggctcacgcctgtcatcccagcactatggaaggccgaggtgggtggatcacctgaggtcgggagttcaagaccagtgtggccaacatagtgaaaccccatctctactaaaaatacaaaaaattagctgggcgtggtggcaggtacctgtaatcccagctactcgggaggctgaggcaggagaatcacttgcactcaggaggcagaggttgcagtgagccgagatcgcgccattgcactccagcctgggcaataattgtgaaactccacctcaagaaaaaaaaaaaatgcataaggcagcagtccccaacctttttggcgccagggactggttttgtggaagacaattttcccatggaattgcgctgtaggggaatggtttctgatgaaactgttccacctcacatcatcaggcattagattctcataaggaacgcacaacctagatccccttgcatgtgcagttcacaacagggttcgcgctcctatgagaatctaataccgccactggtttgacagcatgtgcaggcggtaatgcttactgcctgccgctcatctcctgctgtgccacccggttcctaaccagctacagaccagtactggtccacagcctggaggctggcaactcctggcatacggcataaatttataaaactgcaaggcaaatacacaaatccataattatagttgaaggagaacaattcccctctatcaataattgatcaattgagtagaaaaatcactaaggacatagctgaactcaacagcatcattaatcaactggatttaattcatatgtatttatagaatacttcactcaacaccagagtacacattcttctccaaactacataacatattcaccaggatggactatattctgagccataaaacctaccttaacaaatttaaaatagatattctgtaaagtatgcaatctaaccatattagaattaatctagaaaccagtaacagaaacacagttgaaaatcttccagaaagtcgacatttgaacaacaaacatccaaaatacatgaaagacaaaccgaactgtcaagagaaatttaaatattctgaagttgatgagaaaactatatcttagggccaggcacagtggctcacgcccataatcccagcactttagaaggccaaggtgggtgaatcacttgaggtcaggagttggagaccagcctggccaacatggcaaaaccctgtctctactaaaaatacaaaaaattatctgggcatggtggtgcacacctgtagtcctagatactcgggaagctgaggcaggaaaattgcttaaacccgggaggtggaagttgcagtgagctgaaatcatgctactgcactccaccctgggcaacagagtgagactgtgtctcaaaaaacaaacaaacaaatatatatatatacatacatacatacatacatacatatacacatacatatatatacatatgtgtctgtgtatatatcaatgtctgtgtgcatatatatatatatatatatatatatatatatatatatatatatcttagccaaaaacacttttcatagagatgagatctatattccccaggctggtctcaaattcctgggctcaagtgatcctaccaccttggcctcccaaagtgttgggattacaagcatgaaccataatgcccagccttagcgaaatgtttgaaatgtagcaaaggcagtgtttacagggaaattcaaagaattgaatgcaaactctggaaaataaagatctaaaatcaatgctccattttgagaaactaaagttccattttgagaaactaaagaaagaactccaagataaatcactcagaggaaaattacaatgagaatatattaatgaaattgcaaacaagatatcaattaaaaacatcaataaaatcaagagctagttctttaaaaagaccaagaacattgctaaacccacagccaagccaactcagaaaaaaaaagggggccatcactactattcctatgcacattaaagtgaccataagggactattcagagcaattgcatgtctacagatttgtttaattacatgaatgggccaattccctgaaagacaaaatctaccaaaactcacaaaattagacccatgtaatacgaacgggcataatctatttaaaaattggaatcactaaataacaaatgtcccaagaaaaaggaaccagaccaggatggtttcactggtgaactctggcaaacacttatggaagaaatgacaccaattttctacaatctcttctgaaaaagagaagcagagagaaatcatgttataaggccaacattgcccttgcactgcaactagacagatgatacagacatatctccgccatgtaagaatataaaaggaagactgctatctgcaaaccaagaagcaggcccttactagagacttcatctgcttgaacttggaaacccagcctctacatctttgagaaatgtttgttgtttatggtatgcagcctgtggtaatctgttataatagcttgaggtgaccacacatcaaggctttgaagtctatagtaatgaggagagtatggtattaaccacaatgactaaaagagaaaccaatggaaaatagccaattctaaaacaagatcaccaatttaagacacaagaacctatgacatgcaggtattagcaggcaacgatataaatgggagacacttcaacacaaaagacagggacaaatggttatcttcaagagaaaaatcaattttctgctcatcatcttcacatacaataatcaactcactatacacctacctgttttgtgaattcttattcacttgatattgccccagtttccattttggtttttcgtttttgttttttttgaggcagactctcactcactctgttgtccaggctggagtgcagtggctcgatctcagctcactgcaacctccacctcccaggttcaagcaattttcctgcctcagactcctgagcagctgggactacagatgcgcaccaccacaccccgctaatttttgtatttttagtagatacagggttttaccatgttggtcaggctggtatcgaactcctggtctcaagtgatctgccagcctcagcctcccaaagtgctaagattacaggcatgagccactgtgcccagcccagcttccattttgaatttgctttgaacactctccaagcagaaaatgggtttgtaatctcagatacactttcttgttctctacctcctcctccttcctcaatgtggttgatccagatatctcccttacgtaaccatctttctgtcaccatgtccctatgggacagctaaatacaacttgcctgactcaccccccacagcccacatggactgcagacatgtgtagcagtgaccacctctcagtcaaagctggactctggggaacttgcgcatacttccttttaaacacaccaattagaactccccaagagaagcctggttgggtaacccctgggccccaataaaggcttcagctcatgagtccccctccctctcttgttccgcacatactggtcaagtgtccatgtaactcaagaccgctaactcttggtcttcaaggcatgctaatctcttctgtctaggatgtctatgtaaatgcactgtttctattatttcctgtattttgttgagttgccttttctatgtcgcacctgaccaacacatctgaacctaagttctatccagatcaaagctctctttgtaggattgtcttggctgcggctgtcttggtagaaataaaataaaaatttgtcagaaaaaaaaaaaacccacgaaatgtcagcaaaaacaagtgttcttgaagaggaacacttggtcactagtctgacatttaggcattattaggccccgaccaggaaaaagaaaaacctaaagggtcacatttggctggcttccaaattaatctacctgggggaggtcttctgatccacggcccacatcctgtccctgagtaaacaatcttatcctgggctgggggtggtggttcacgcctgtaatcctagcactttgggaggccaaggcaggcagatcacctgaggccgggagtttgagaccagcctgaccaacatggagaaaccctatctctactaaaaatagaaaattagccaggcatggtggtgcgtgcctgcctactcgggaggctgaggcaggagaatcgcttgaacccgggaggcagaggtgatggtgagcggaggctatggtgagccgagatcacaccattgcactgcagcatgggccatagagcaagactccgtctccaaaaaaaaaaaaaaaaaaaaagaatcttatcctgagtccctcaaatcatattgtgagttcttcaaactgctgatgctctcattaacatgtaacctactgacatcaaaaaggatcctgattcgtttctaaatcatgaagttttcctgattgtcttccatgtagaaccttttagcctgtatgttgtcatgtgtaaccaatgtttataacctctgaattgtaccctccaatgaaaaggacaattcaccaatgaggagtccccctcccttctcctaaaggttcttaggaaagcgtctgatttgtaatggaggttggaacacatccaaatttgctggtgtgtcttcctgggtcaatcctcaaatttgaccagtaaacctacataaaatgacttctacctcaatagccttaatttaggtcaacagaaggctctcagaaaggcacaatttcagaaaatgaaagcccacaagggaaaaatgttctgcaccaatgctaatcagtaaaaaccaatatatactcatatggagataaataaaagataagtctttgtaaggaataaacacacacatgcgtacacggtcagacaggtaatgtacacatgccattagaatttcttagaaaacttaaattcatccataatctacgaccagtagtgggaatattgaggagagaaagttaccccctggggaaggctctggaaaccaagggacttactgtgacccctataaagagttaggttgaggagacaggacggtggattagacaggatggtggacttcagactctgctgtccaggggaagggtccgcagaccgggtagtcgcccgtagggaagtctgggtcctgccccagctggtaacagctggttccaaccaacccctcctcccgtctccggacccctaggccgtgcacacgcaccatttcctggcttccacggtgtcccggggtcttctctacggctcctgcggcctgtgcgggtcccagtgtgccagaggctgccacagaactttcagggcgtctcttagcaacagagctgggaaccaagcgcaaggagtggagaagatgccctgggctcttggaacctcacagcctcctcgcggcagctcccttattcacagttctcacgaccccaccccacgtccctgattgagtagtgtaccatgtcctgccccctggggaactcagtgacagaagaaggtatctcttggtgctgagtggaggcagaaaaacaggttccagacccagaccctcacagagcgatcttcttgcctagtggttcctagtgctgtgaccttatcccgcccctggggacatttgcatgtgggcataatttcccacctgtactcaatgagctcttactacctcttcccctggacagatcacaagtctgtgctgggaatcccagaccactgtccagtggagccatcccctagcctcagagcaggaggggagcccaagccacacaggccaccctgcagcaggagggaaggcctgatatcctccagggatcaggaatttcagatggggctgctggcgacatggccaagcctttctcccaccttatctctcaatctactcattttcagctcataaaagcacatcaacaatgaaataaaactgttacatgcatggaaaaactggaattataaggcaacagtcttctataaaggaatcaaaagagaagaaaggaagaaacatgaactagctcaaagcagcagcctgctgaacccacagttcacaagcaaactccctttcaggaggtcaaacagattcccaagcttaggagccaaactctgactcctgaaacaatctagtgatgaggcagggacatggaagcatttaacttttggcactcaactcgccctcctatcctgcttgcacactgtggaaacactcctttcttcaacactttaaatgttaacgaattaaacgctccaatcaaaacctgaaacattagactttgaatctgaaaacatgagttttgccatgtttttaaggaccagacataaaagcattgtgaggccaggcgcagtggctcatgcctgtaatcctacctagcactacgggaggctgaggcgggcggatcagctgaagtcaggagttcgagaccagcctggccaacatggtgaaaccctgtctctactaaaaatataaaaattagctgggcgtggtggcacgtgcctgtaatcccagcttcccgggaggctgaggcaggagaatcgctggaatccaggaggtggaggctgaagtgagctgagactgtgccattgcactccagcctggtgacaaagcgagactccacctcaaaaaagaaaaagcatcatcaactgaaaggtggaatccattgctaaaagaaaggaaccaaacatgaggtgtcatcagattaaatgaaatcttctatttttaaaaactgtagcttttcctgacagggaaaatgggcatgtttggcaaataagaaataaatgatgtctgattataactcatcaacaaataattttcatgtcttaaaaaatgacatacacacacacagtctattatcacaagattttgttccctccttgaaggataaactactgctctgcaagatgctccacccttcactcctcacattaactgctgctagcatatttatttgttccaaaacaggtataaaaagagggttcagtgtgtcaaactacatgattgttagaggtttatgtacagattttgtatatttttacaaactgcaccagttaagtagttgatttatgttgtttttgttttttgtttgtttttagacagagtctcactctgttgcccaggctagagtgcagtggtgcaatttcggttcactgcaacctccgcctcccaggttcaagcgattcccctgcttcagtctcccaggtagctgggattacaggcatgcatcaccactcccggctaattgttttttgtttttagtaaagacggggttttgccatgttggccaggctggtctcgaactcctgacctcaagtgatctgcctgccttggcctcccaaagtgctgagattacaggcatgagccactgtgcccagcctactgtgttgattcttacaaaagctctagtacaaaaataaatgttcacgttaccatgatgaaaaactcaggaatggtgactcctcgattcctctgaaaaacaattttttttaaccctaagagaagctaggaagtctacagtaaatggctggaggtgatccctgagagaacacattttagtggaaaaggtcactcatggaaaataccaaaatttatatgtagcagtttaaatatactacaggaaacactgcgattacattcttcagttacctctatgacagcatgatggtttttttttaggtagggtgtttctttttggttttcttttaaaaaagaaaactgtaggctgggcacagtggctcacgcctataatcccagcactttgggaggccaaggtgggcatatcatgaggtcaggagatagagaccatcctggctaacacggtgaaaccccatctctactaaaaatacaaaaaattagctggtcatggtggcgggcacctgtagtcccaactacttgggaggctgaggcaggagaatggcatgaacccaggaggcagagcttgcagtgagccgagatcacgccactgcactccagcctgggcaacagagcgagactccatctcaaaaaaaaaaaaaaaaaaagaaaagaaaactataaatctttccccacaactgtaaatctttctcattcatagagatatcttcctaaatgtgctactaaacttatatttatattttcaccatttcagtgtgacttcattttaatgcatgctgttataagggtctcagttgctcttctctgcaggtcaatatctgttgcgggaagtcagggacaccaaatggagggaccggctggaaccgtgacagaagaacataaattatgaagatttcatggacatttatcagttcccaaaattaatacttttataatttcttacggctgtcttcactgcaatgtctgaacataaattgtgaagatttcgtggacatttatcagttcccaaatgatatttttataatttcttatgcctgtctttaatctcttagtcccgttatcttcgtaagctgagaatgtacatcacctcaggatcactattgtacaaattgattataaaacatgaaatcagtgcaccttaaaaaagaacagaataacagcaattttcaaggaacaagggaagataaccatatggtctgactgcctgtggggtcgggcagaatagagccatatttttcttcttgcagggagcctataaacggatgtgtgagtaggagaaatatcactgaattattttcccagcaaggaataccctggggaaggaatgctttcctggggggtggtctataaacagcaactctgggagtgtctgtcttacgtggttgagataaagactgaaatacacactggtctcctacagtaccctcaggcttactaggattgagaaattccagcctggtaaattttggtcagaccggttctctgctcttgaaccctgtttcctgttaagatgtttatcaagacaatatgtgcacagcgggacatagaccctcatcagtaattctaattttgcctttgccttgtgatctttatcaccctttggagcatgtgatctttgtgacttactccctgttcacacatcccctccccttttaaaatccctaataaaaacttgctggttttgtggctcagggtcgtcatcacggtcctaccaatatgtgatgtcacccgtggaggcccagctgtaaaattcctctcttcgtactctttctctttatttctcagactggccaacacttaaggaaaatagaaaagaacctacactgaaatattgggggctggctcccccgataaatatccaattttcctagcaccctgttgaaaagactttccccattcatgtatcttggcctatttgctgaaaatctattaacggtcaatgaagggtatctttatctgtttctgctgatataatgaaatactatagatggggtaacttataaggaacagaaattggccaggtgcagtgactcatgcctgtaatcccagcactttgggaggctgaggtaggtggatcacctgaggtcaggagttcgagaccagcctgaccaacattgagaaaccccgtctctattaaaaatacaaaattagccggtcatggtggcgcatacctgtaatcccagctactcagaaggctgaggcaggagaatcacttgaacccaggaggtggagtatgcagtgagccaacatcacgccattacactccggcctggacaacaagagcaaaactccgtctcaaaaaaaaaaaagaacagaaatttatttttcacagtcctagatactgggaattccaagataaaggtactagcatcgggtgagggccttcctcttggatcttctggagggaagaaatgcttgcatcctcacagggcagaagacagaagggcaagagagggcaaaccccatccatcaagcccttgtagtggcattagtttattcatgagggctttgccaaaaggccaaaggcctgcctcccaaaactgtttcactggggattaaattctaacctatgaattttgcaggggaaataagcattcaaaccatggcaaaggggatgatttctggactctcagttctgtcttactgatctgtgtatcagacatttttccagtaggtctggctactatagtccttgacctgatgatggagagctccaccccattccacatgattgtcatgcacggatagaaatggtcctaaagcctccagaagatctccttgacatactcttagacaacatagacttacttctattttgggatagctcctgtaaatgaattgttaaggaaaacataataatgggttatgcaatattttctttctttgttttttgagacagtgtctcactctgtcgcccaggctggagtacagtggtgtgatattggctcacgcagcctctgtccccctactcaagcaatcctcccacttcaggtttccgagtaattgggatgacaggcatgcaccaccacactcagctaattttttaactttttataacaacaaggtctcactctattgcccaggctggtctcaaattcctggcctcaagtgattctcctaccttgatatcccaaagtgttgggattacaggcatgagccatcatgcctggcctaggcaatattttctctacatgaaacacttgaggcatactcttcactcactgtaaaatcagtatgagcctagagctcatagctcttactacatcttgcacgctgacaaacaggaaaactgcctctactgacacagactgcagatatgcttttggaattccttatgcaactggcacaatttgaaaaatttgtggattcacaacttgttctggtatacccactgccgatagacacataactgggctactattttttttttttttttttttgagatggagtcttactgtgttgctggggctggagtgcagtggtgtgatcttggctcactgcaacctctgcctcccgggttcaaatgattctcctgcgtcagcctcccaagtagctgggattataggtgcccaccactatgatcagctaatttatttttgtatttttagtagagacagggtttcaccacgtgggccaggctggtctcgaactcctgacctcgtgattcgcccacctcggcctcccaaagtgctgggattacagaggtgagccaccacgcccggcccataactggtgaactattacagatgatttgcctccctattaaaatggccactgttcactgtctagtccatactacggagatttatactatatctctagggaatgatagggctcaaaagattgctaaataggaagccaaaaatggtaccttgttctttcccaatccagtttgcaaaactgcctttacccgtgactgatattatcaagtaaatgtcccataatctaagaagatctatagatacaaaagggaaaaatagtattgtagagattatacattaggccagtcacactccctgtgctattaatactttccttcaatcttttcccttacacaaatctctcaccaagttggacatagaggcagatgggaaagagttaagaaaacgaaagacaactgactggcctggcatctacaaaattactgacccacttatttctcagtgcattacttgtaacccacccaatttctggatgaagctcacaaatttcacagaatcctccaacacccacactgaccctcccagccctccaaatggatggtttatctacaactgtagtcaattctcattgtttagtgattgtctccatgtttagtggatgggcgcaatgctatacagctagacatgatgatgccatcagtggtaaataattaatcattgaaattattcctggttttagtattcttttgtggacagaacaaaaccaatgaggtaattttatatgtgctgctgaagcgagcacaaccaaggaggtaattttatagctgatataaaccacattcttgcaaaaactacggaagacttattaaaatacataccatccttaaccatcagagcaaagagaatataaaaatctaaacataaaaaggactttagagaaatagctgtcaaaacactggacttcaatggccagaagcattagccctggcccttataaaaatctgaaatactaccaacagtagacatggattatctccttttctgtagtttttgggttttggttgcactgtagctattggtatatctaaactttacattcctggattgagtaaatattcttgggaatgaagtgaacaatatgatgctatgactagctacatgtaagaactaaccagtggccgggcatggtggctcatgcctgtaatcctagcacttcgggaggccgaggcaggcagatcgcttgaggtcaggagttcaaaactagtctcgccaacatggtgaaaccctgtctctactaaaaatacgaaaaagttagccaggcatggtggtgggcacctgtaatcccaggtacttgggaggctgaggcaggagaatcgcttgaacccgggaggtaggaggatgcagtgagctgagatcatgccactgcacttcagcctgggcgacacagtaagactccatcaaaaaaaaaaaaaaaaaaaaactaactagtatatttggagcatgtcatcaacaggttaaaaaaaatgccatcacttttgaccaaaagataaggtatttccaggtgtggtggctcaggcctgtactcccagccatttgggaggccaaggtgggaggataacttcagtccaggggttcgagaccagtctgggcaacatagcaagaccctgtctctgtaaaaaaaaaaaaaaaaattagctgaatgtggagatatgtctcagtagacctagttactcaggagacagaggcaggagcatcacatgatcccagagtttcaaggctgcaaggggctgatcatgccagtgcactgcagcctgggcaacagactgagaccttgtctataaaaaaataaaaataggtcaggcacagcggctcacgcctgtaatcccagcacattgggaggctgaggcagctggatcattcaaggttgagagttcgagaccagcctggccaatattaaaccccatctctacttaaaaatacaaatattagctgggcatggtggtggacgcctataatcccagctactcgggagtctgagacatgagaaccacttgaacctgggaagcagaggttgagtgagccgagattgcaccactcctctccagcctgagtgacagagtgaaactgtgtcttcggaaaacaacaacaacaaaagaatattattcaggcataaaaaagcaatgaattactgacatatgctaccacatggagggaacctgaaaacatgctaagtgaaataagccagacacagaaggacaaatattgtatgctccacttatttatttttttgattcgtttttttgagacagagtctcactgtcacccaggctggagtgcagtggtgcgatctcagctcactgcaacctctgcctccatggttcaagcgattcttctgcctcagcctcctgagtagctgggactacaggcgtgcaccaccacacccagttaagttttgtattttcagtagagacggggtttcaccatattggccatgccggtctcgaactcctgaccttgtgatccacctgcctcagcctcccaaagtgctgggattacaggcgtgagccaccacgcccagccctagatgctccacttagtcaaattcacagagcaagagagtagactagacgtcatcagggattgagtgtagagaagggaagttgttttttaatgggtactgagtttctgtgtggagcgatgaaaatctagagataattagctgtaatggctataacacattgtaaatgtatttaatgctcctgaatgacacacttaaaaatgattaaagtggaaattttatgttagtacatgttacttcaagacaatttatgaacaaaagaaaagacacaattcaagctactatatatgaacacaacaatatctagaagcactggatggaggttggtgtggtggcacatgcctctagtcccagctactcagagcctgaggtggaaggatcgcttgaactcaggaattcaagcccaacaggggcaactagtaagaccctgtctcttaaaaaataataataatgataataataataataataatgcactgaatggacaaaacagcagaggagatattgctgaaataaagataagtgaacctcaaaaactaggagtataaccgatttaaaatatagcactcagacaaaaaaatgaacagaacctcagtgagctgtgtaatgggacaattgtacaaggactccttgaaagacaggagtaaaaacagaacaaacaaaaaatatttccataaatatttcaggccgagcacaatggctcaggggtttattgagctttttggatctctaggtttatagttttcatctaatttggaaaatatttgctgtaatcccagcactttaaaaggccgagacaggcagatcatgaggtcaagagattgagaccatcctggccaacatggtgaaaccctgtctctactaaaaatacaaaaattagctgggcatggtggcacgcgcctgtagacccagctactcaggaggctgaggcagaagaatcatttgaacctgggaggcggaggtttcagtgagacaagattgcgccactgcactccagcctggcaacagagcaagactccatctcaaacaaaaacaaaacaaaacaaaacaaaacaacaataacaaaactagcagtaacaatatgttttacacaggagtttgagaccagcctgggcaacatggtgagaccccatctctacaaaaaaaattaaaaattagccagattgccgggtgcggtggctcacacctgtaatcccagcactttgggaggccgaggcgggcgtatcacgaggtcaggagatcgagaccatcctggctaacacggtgaaaccctgtctctactaaaaatacaaaaaaattagctgggcttggtggcaggcccctgtagtcccagctactcaggaggctgaggcaggagaatggcgggaacccgggaggcagagcttgcattgagccgagatcccgccactgcactccagcctgggcaacagagtgagactccgtcgcaaaaaaaaaaaaaaaattagccaggcatggaagctcacaccagtggtcccatctactcaggaggctgaggtggaaggatcacttgagccttggaggacgaggctgcactgagccatattcatgccacagcactccagcctgggtaacagagtgagaccctgtctcaaaacaaacaaacatttgtcgcatattttccaaaacagataaaaattatgaacctacagatgcaaaatgctcaacaaaccacaggcacaatatatatcaacaaatctacaccaagacacagcatcaaattgctgaaaaccaggtataataaaaaattctttaaagaaaccagagaaaatagacaccttaacaacagacaaccaaatgtaacattgattacatacttattatcagaaacaatgcaaacaggaagacaatggagtaacatccttaaagaactaaaagaacaaggatatcaacaaagaatcttatattgagcaaataatatctttccaaatgaatggaaaatactttatttagtcataataaatgtgtttgcaatcagcatattggctcattgagaaaggtacagccgggtgtggtggctcacgcctgtaacctgagcattttgataggctgaggtgggtggatcacctgaggtcaggatttcaagatcagcctggccaacatggtaaaaccccatctctactataaacacaaaaattagctaggtgtggtggcgcatacctgtagtcccagctacttaggaggctgaggcagaagaatcacttgaacccaggaggcggaggatgcagtgagccaagatcgtgtcactgcactccagcctcggcgacagagtgagattccgtctcaaaaaaataaaggtccagctgggtgcagtggctcatgcctgtaattgcgacactttgtgacgccgaggcgggagaattgcttgagtccagaagttcaagaccagcttgagcaacacggcaagactccatctctacaaaaaaattaaaatggcatggtagtatgtgcccgtccagatcactgaatccgtaaaaaaagaaaaacaggccaggtgcggtggctcatgcctgtaatcccagcagtttgggaggtcgaagcaggcagatcacctgaagtcaggagttcgagaccagcctgacaaacatggtaagatcccatctctactaaacatacaaaaattagctgggcgtggtggcgggcacctgtaatcccagctactcgggacgctgaggcaggggaatcacttgaacccgggaggtggagaaagcagtgagccacgagatcatgccattgtactccagcctgggtgagacaatgagattccatctcaaaaacaaaggaaaacaaaacaaaaaccaaacaaacaaaaaccaaactggctgtcttactactggggtggctgagtaagtcctctaaactactattcctatcaaatggtccttggacacacccttagagttttctcttcccaagatgatttttcatcttggtaatatggatagactgggaattttccaaatctttttgtttcagttccatcttaataattccatctccagtcaagtctttcctcacattagtatatgcagtcaagaggaaccaagctgcctttttcaacacttcttagaaatgttgtcaactcaatatccaatttcatcacttcctagttctactttccacaaaactagcacaggaccacgatacacaaagttctctgccactttataagaagaaatcaacttttctccattgtgtaataacattaacctcaattctctttttacatatattttagtttgtttcagaaacagggtctcactctctctccagcccaggctggagtgcagtagcatgacctagcttactgcagccttgaactcctgggctcaagtgatctggtgacctcagcctccctggtagctatgactacaggcatataccaccaagcctagctaaattttccttttttctttttttgtaaggatgaggtctcaccatgttgcccagactggtcttgaactccaggcctcggttgggcatggtggcacacacctgaagtcccagctacttgggaggcctgaggcaggaggatctgttgagcttaggagtcggaggtggcaatgagctataatcacgccactgcactccagcctgggcaacaaattgagatccccatttccaggaaggaagggaaaggagaggaggggaggggaggaagaagagaagagaagggaagggaaaggggaaggagaaggggaaggggaaaaggaagaggaaggggaagggggaaaatccaagcctcaagcgatcctcccatcttggccattcaaagtactgccataacaggcatgagcgaccatgcacattccactttcatttttgaggatccactctcataatctaacctaatccttatcatatctcaaagaaaccattgcctaatactgccacatcagggaagtggaaaaataaataaaattttctacaaacatttattccataacaagtgattagtagctttttatcattttctaaatactcttcatgttaatcccttatcagatatataatttggaaatggtttctcccattctatgggttacccatttactctgttaatattgccttttgatgccaaaggtccacaaaatccaaattattctttcccttgtgggtcatgcttttggtgccaaatctaggaaatcattgccaaattcactgtaatacagcttttgccatgtattttcatctaacagttatacagctaagatggacactcacatatttcgttcattttaacttctgtacatgttaggtatgggtacaacgtcatcctgttgcatgtggatgtgcattgcccaacagcatcattctacagaaacattaagctatcccccattgaatagtcacagcagacttttcagtaattgttagactttatgtaaattattagactttattagactttctgtgttatcttgttgcattgtctatttctgcgttattacgctagtaccaaacagtttttattagtatggatttgtaataagttttgaaatcaggaagtgtgagttcaccaactttgttctggctttttttttttttttttttgagacagagtctcgccctgttgcccaggctggagtgcagtggcatgatctcagctcactgcaacctccacctctcaggctcaagtgattcccctgcctcagcctcctgagtagctgggattacaggtacgcgccaccatgcccgactaatttttgtatttttagtagagatgcgatttcaccatgttggtcaggctagtctccaactcctgacctcatgatccacctgcctcagcctcccaaagcggtgggattacagatgtgagccaccacatctggccattgttctggcttttgaagactgttttgttcattcagagacccttgagatgtcatatataaaaaaataaaaaatgttaaaaaatggctcctaagaaggaatcaagtggtcaaacctatccctaaaaggctagcaggggacaaaaagtggtatctctcaataagaaaatacaaacctaagatgttttgaaaagtggtgtatcaccttggaaagttcgtcataaggtaagaacaaaccaagaaatcacacactaaagcagagagaagctgaagttcctcaaagtgttagagctgcccctacagtggcaaaaatgatccctctagttcatgataaactaaggataagcattaagtgtgtggctagaggacacgtcacagaaccacagccctactgatggtaacatcatacttgaaaaaacacttagccaggccaagcgcagtggctcactcctgtaatcccagcactttgggaggccaaggcgggtggatcacaaggtcaggagttcgagatcagcctgaccaacatggtgaaacccagtctctactcaaaagacagctgggtgtggtggcgcgcacatgtaatcccagctactcagaaggctgaggcaggagaatcacttgaacccgggaggtgggggttgcagtgagccaagatcacgccactgtactccagcctgggcgacagagcaacactccgtctcaaaaaaaagaaaaaaaaaaaagaaggaaagaaagaaaagaaaacaaaaaacacttagcctctgtaagcatcactgtgagggggctgaggagagcaagaggaaggagtttgaagccagtaagttctggctaggctaactatgcaacacagtgcagcccaagaacttgaagaccacaggagaattggcatcggctgatgccagggaaacaacagcattcctagaagagctcataaaacagaaaaaagacactaccttccagagtaaatcttctattgtcatgaatcaggcatgttctagaagatgcccaatggtaccttcatacatgagtgcaggtactggggttcaaggcctggaaagaccacctttttctggtgctgtcaggccatgcattagttcatgagaacaagcgaggcttcgtctactgagcaatcaccaggttctttaggacaaaagcaaaacttgctggcctgtgtcctggcaagaacataagaaggctttcttctagcaatgcttcactcctgatgtgatggaatacctcaaagagaagggactgccactcaaggtcttcctcagaattgacaacactccaggccatctctccaatctctgttttgcctaaaagaacatgcaagtgatatttctgcctcctaaaactacatcactgctgcgtcactagatcaaggcatcaagtgcattcaagtgacttacatccttgggtgaattcatggagtcttgatgctaaccttgaatgtaccacagtggttttattgaagagcttcacaattacaaatacaattgtgcttattgggaaggctacagatgccctaaagcccaggacagccaatacatgttacaagccatcatggggtaagggagtcaatgatttcaaggacttccctactattaatgcagttattaagaatatgtgaaatgttgcaaaaaaagttggtggggaacgctgtctgaaatgactgaggatgacgttaaggaacacaccgaaaagcaaagagaaacccttaccagctaggaacttcaaagtctgctgaaatccactacagatgatgatgagctagaaaacttagaagacacagagccattgatttggacacttgaaaagtttgccacagtttttcagtaggcaaaggtgaaaaagaggtacgatcctcaaagatcctataatggaacaaagctttcaatctacctgagaaacaacaacatgcctataagcaccacaagatttttttttttaatgaagcaaaggaaaagaagaactagcttcctatagctaagcatctgcaaataagacggaacattcaatggttttttcagtaggcaaaggtgaaaaagaggtacgatcctcaaagatcctacagtggaacaaagctttcaatccacctgagaaacaacatgcctataagcaccacaagattttttttttaatgaagcaaaggaaaagaagaactagcttcctataactaagcatctgcaaagaagatggaacattcaatggttacagatcttcagccctcaagccaaacagatcctaacattagtattacatagcctcctcaaatgagtccacatctataatcacaagttggttcttccaacatagatgatagtcctgatggcctgtcaagattcaagttaacctgatgtctcactacttacccacaatgccatacatctagtcatctcaacacatcaaaacactgggcaccacagaatcatcatcattgttataatcactatacttgggttatcaagagagaagacccagggttttggtaagtgttaacacattaaacagaagaaataggtgagagttgaaacaaagaaactttaatgttctggctgactacactatgttgataggctcacaattactgcatctatactgaaaatacatagactcttttccttatcatgattccctaaacaatacaatagaacaactatttgcatagcttttataatgcatgaggtattttaagtaatctagacataattgagactatacaagaggatgtgggtaagttacatacaaacatgtcattttataaaagggactggacatggctcacggagtgctggaaccaatacccagcaggtatcaagggatgactgtactggaaagaaactgaaactacttaaggctttaccaagtgcttacattcacagggtctatctccaatgtgtttcgtacaagtatctgaaatgaaataaaattaataaatgctttcccacattccatacatttagagagaatgctagtgagtctttttatgtctatgcaaggaactgagagaagcaaatgctttcccacattccttacattcatatgggttctctccagtgtgagtttttttccagtgagtctttttatgtctatgcaaggaactgagagaagcaaatgctttcccacattccttacattcatacgggttctctccagtatgagttttttcatgtccttgaagaaaacgggaatgagtgaaggctttaccacattgtggacattcataggatttctctctcatgtgaattctttcatgtcgtagaaagcaagtgagccaagagaatgctttcccacattccttacattcatacggcttctctccagagtgaattctttcatgtacctttaagttatcataatgaccgaaggctttcctacatgttttacactcataaggtttctctcctgtgtgagtccttttatgtcgagaaaggtatctgaaacgactgaatgctttcccacattccttacactcatatggcttctctccagtgtgagttgttttgtgattttgaaaggaacagaaatcaatacaggctttcccaagtttgcatttatagggtttctctccagtatgagttgtttcatgccttcgaagggaactggaaatacggtaggctttgccacattgtttacatttatagggtttctctgcagtgtgagtcctttcatgtctttgaaatacactgggataaacaaaggctttcccacataccttgcatttatgaggtccatctccagtgtgcattatcatatgacttcgaaagcttgagcgatgagataatgctttcccacactgcttgcattcatagggtttctctccagtgtgagttctttcatgactttgcagtgaactaggacaatcaaagcctttcccacatatcttacatttatgaggtccatttccagtgtgccttatcatgtgtctttgaaagcttcccagatgatgaaacgctttcccacattgctgacatgcatagggtttctctgcactgtgagtggtttcatgtctttgaagggaaccggaaacactgaaggctttcccacattgtttacatgtatagggtttctctccagtgtgagttctttcatgtattagacaagaactggaatcagggaaggctttagaacactgcttacatttatatggtttctccccagtatgtgttctttcatgtcttagataggaactgtaaaaaggaaaggctttagaacactgtttacattcatacggtttctccccagtatgtgttctttcatgtcttagataggaactgtaaaaagaaaaggctttagaacactgcttacattcatatggtttctctccagtgtgcgttctttcatgcatatgtaataaactgggccaaaaaaacgctttcccacacaacttacatttataaggtccatctccacgctgcactgccatgtgtctttgaaggtttcccaaagaactgaaggacttcccacattctttacaatcatatggtttctttccagtgtgaagcctctcatgtgtttgaaatgagttgtggtaactgaaggctttcccacgttgtttatgcgtatctggcttctctccacattcatgatactcatgtggtttgtgcccagcaccaactctgatgtaacaattaagggatgaatgacccatgactttttctcctctcatactgctttcacaaggacctactccaggaagagtgttcttggtcacaatactatcttgaatctggctagatgtttctccacattgagttccatctttactttcaacaaatctctctaacatacgacatctgtaaaaaatgggaaatatatcactaaaagtcggtctataaataattgtataggtattaataagtattggatgtacatttttaacactatcatgcgaagtgcaggcttcgtgtcctgcttgaatgtgaatggatggaatgctgtgcaaggtaactcgacccaggtgttctcaagacaatcacattcatatgtggattcataatattgttgtcatgggaactaatttatgaacactgaacagctatggaacatttaagtatatattttggagaaaattttctaagaataaataaatttaagctagccttgttcattttctttgcttctttttaaattttcatgtcattctcagaacggctccagggacatatctttctcttgtgagtgtaaattaccttagatttttcctgggatatctatattgatcttcaatgttctggtctttccatttcattactaaaaggtatacacagaaaaatcattacaaatttttacaaaattatagacaaacagtaacattttgatgtacactgcaatcgttcaaaatgcattcactgaagtacacctgactcttgaaaaacagaggtttgaactgcacaagtccatttgtatatacatatatatatgaatgttcttcagtctctgctacccaagacactaagaccagcccctcctcttactcagcctactcaatgtgaagacaatgaggatgaaaacctttccgaggatgcacttccacttaatgaacagtaaatatagtttctcttccttatgattatctttttaacactttctgtttctagcttactttactgtgagaatatacgatgtaataatacgacataaaatatatgtattaatcactgcttatgtgactgataatgctgcccatcaatagtaggctaagatgtggacaaaaagttatatgaggatgtacaactgctacaggagctggcacccctaaaccctgtttttttttttccagggccaaccatatcccctttccatattccaaatctttgaacagcatgaatgaccaagaaacaaatgtctccaattaaataagtggaaatgcgatgtcatccttacctacacaatccaggttcctgatggtttcctgcatcacatctttgtagagattcttctgacaaggacccagcaaagcccactcttctcgggtgaagttcacagccacatcctctaaagccactgaggcctgatccatcccacatgtacagaggaggaagggtgaaaatcacagtactgagaatctatactcacttcataaatttcacatgatgctgtggtttccaaccattttattcaatgacatggtaaacccactcttattctctgtctacactcactttctcctacacagtaactctgaagctacagttaaacgtttggtaaattaacagtgggatagaaacatgccacttgttggcgaactaagtgagtgaatcacatagcctggatcacccctaatgtcgatttccacagtgggtctgcagtccttggcacgataaagtcctactacttattgtgcaaaagggagttaccattagcagtgctgagactgcgtgtccttacaaatgctttttcacaaagttgggcttttcatggtgtctagacagtgtatttaggggagggccccaggagcataataacaggggtggagtgtgcctaaattgttcatgcaaaaaaaatatagtatttcgttaactcccatcttccttctgagagtctggaattttgttacatactcagcagacagagtgcactgatcagccactgctaggtttgaatggttgtcccctccaaaatgcacactgaatgttaatctccaaagtggcagaaaaaaaaaaaaaaagaaaaaaaaagtgggggctttaagaggtgatttagttctgagggtctggacctcatgaatagattaatccataatgggtgaatgaataaatgagctatctcatgtccttctgagaaaagaaagagatctgagctagacactcagctccctcaccatgtgatactctatgccacctagagactctgcagagtccccatcagcaagaaggtttctcatcagattcccagccttaaccctggacttcccggcctccagaaatgtaaaaattaaatactgtttcttataaattaccgaggttcagtaattctgttatgaattacaagaaacaggctaagacagctacaaagaaacactctgggcattgggtctataatgagctttctgggtagataatatttcacatgttttgttgcaacttgttatttgggggatttagcccatcctatgtgattatacttacagagaatatttggaagctggcaactagtttcctttagatcaaatgtagtgaagtatcacaagagactgataaaagatatttcaccatctcaatggaaaaattttaaacattttcttgagtaatgccaaaaggagaaggaaagaaggggaaagactgcatatattcttagaaagaactcaatgtcatctctcatgaatatttataatacttcctaaataactaaaacggaccttttagtagtcaacaaaaattacattaccaagtctaatagaactcacagtatctaaaaaatgctggaaactttctcaccaagaaagtgcagctttccaaaaacaaagaattttgaaactataatatttggctccccatactattaacacagagacaaatatatacatatacatatatatatatgaagaaaaatgaaaactggtagaaaagtctcgtagagtttttatttgtccttggcccaatctctcccccatcaatgacactcttgaacacagcagcccgagttcccagtatagaaccctgaacactaactctagagacagcagatcagaccttatttgcaaattattgccttgcattttccaatctgtataagcactatccaaaggtctgaaacaaggctgctttttttttttttttttttttgagacagagccttgctctgtcaccgagactggagtgcagacacatcacccagactggagtgcagacgcacaaccttggctcactacaacctctgactccagattcaagcaattctcctgcctcagcctcgcaagtagctgagagtacaggaatgctcaaacacatttggctaatttgtatttttactagagacggggtttcaccctgttggccaggctggtctcaaactcctgacctcaaatgatccgcctgccttagcctcccaaagtgctaggattacaggtgtgagccacagtgcccagccaaggccctctcttctactttatctacaatataacacgatcagggtccaatttggcaggaactgcatgaaaatgttgcaaaatacacaaaaagcctgtagacaactgcaagaacagactatgattaagacatacagtagaccaactaagtcacggagaaaaagagctgaagagaaaatgtcctccagatatcagggtactcaaaagcacccaggtatcctagggaattgagaaagccccatgcatgcacagtaaagaacacattttcacaaaagacaccggagaaaaacattcattttcgcttctggctgatctgtagctttaagtaagcagaacataaagcataagtagagtattaaacagcctggctaagtgttcaagggatgccccaggcacagagccatccacaaagactggaagaggtcaggcttttgtatgcttcatcttttttactagcttctagcattcaggaaatctctgccagaacactggatgaacacacactaaagaacagagatgtcagtttctacaacaaataaggaatacagtctgtgcaaacatactttgaaaatgttattaaacaaatgaacaattacagtcttcaacacacataaatagaaaacagtgaggaaagaagaagaatccaattttcagaagtaccccattataacattccgatatctacttttcaacacaaaattatgaagaatacagaaaaacatgaaaatatggttcatcaattggaaaaaatataattgagataagccatctctgagaaacctcagacaccactcactgaataaaaacgttaaaacaactatcttaaatatgttcaatgaagtaaaggcaatgatgaacaaataactaaaagaaaaccagaatatagatacagagataaaataatatctattaaaaagtagaaattaactgggcgtggtggctcacacctataatcccagcactttgggaggccaaggtgtgtggatcacctgaggccaggagtttgagaccagcctggccaatgtggtgaaaccctatctctactaaacatacaaaattagctgggcatggtggtgcacgcctgtaatcccagctacttgggaggctgaggcagaagaatcgcttgaacccaggatgtggaggttgcagtgagccgagatcgtgccactgcacttcagcctgggcaacaagagcgaacctctgtctcaaaaaaaaaggggtagaaatttagccatatagaatttatgcagctgcaaggtacaactaaaatgaagacatcttcacaagtgttcaacagatgtgagcagccaaaaaaaaaatcagttaaaatgatgataaatgaattgaaattaatctaatggggaaaaaaaggaatgaaattgagagaacatgtgattggtgtacttgtcttgccaataatgttaaaagaagttcatcagagagaagaaaaatgttacaggttagaaattcagatcatacacacacacacacacacacacacacacacacaaatatacacatatgcatatatatgaagagcattagaaaataattcaatgaaggcacaaaaattatttccttttcttattcctattggatatcataaaggtttgttcaaaaaataataacaatgtattgggtggttatagtttataatagggcaaatggatgacggtgatgttaaattgggcaggagggaggaatgctgaacactgggttatatgagcattaccctaaaagccagtacagtgttacttaaaactgaaggtccatttgttgtgaatggtttactccaaatgctagggaattcaataataaaatgttaagaaacaacagcctgtcacagtggctcagccctgtaatgccaacactttgagatgcaagacaggaggattgcttaagatcaagactttgagcccacactcagcaacacaatgagactgtctctacgaaacgtgtaaaaaattaaataaataaaaaaaaaattagccaggtgtggtggcctgcacctgtagtcccagctactcaggaaagcaagtagggaggatctcctgagcccaggagttggaggttatagttaactatgattgctccactgcactctagcctaggtgatagagcaagaacctgtctcaaaaaaaaaaaagaaacaaagaaacaaagaaacaagtagacttactatactattagaagaaaacacaatcatatagacacctcagttaaaataaaaggagacagaaaaagaaaggaagttgaaaaaaaccgacaagtataacaaatataaaacaattatatatgtacacatgaatccaagtatatcaataaccactttaaatgtgtattatatgaatataccaataaaagaagacaaggactgacagagtagaataaaaaaaacaagacctaccaatgtgtgcaagaaaactattttttttattctctcaagaaaactattttaagtagaaagacacaggtacattaaatataaaggtatgaaaaaatatactccattctagccctaatcaaaagccatatggggatgggcatgatgctcatgcctgtaatcccagcactttaggaggccaaagctggtggattgcccgaggtcaggagttcaagaccagcctggccaatatggtgaaaccccgtctctattaaaaatacaaaaaaaaaaaaaattagccaggcatggtagcacgcacccgtagtcccagctactcaggaggctgaggcaagagaatcgcttgaacgcaggaggcggaggttgcagtgagctgagatcgtgccactgcactccagcctggacaacagagatgctgtctcaaaaaaaaaaaaaaaaaattggtcttagctggaggtgggggcattggcctcaggcctctctgccatagtcaaagctactctcttacccttctatgctttacatggatatttaaaaacaaaatactcatgtttgatgaatccaggaaaatcactcaaattcagtgtctatgtctacgggtgggaaggaaattgtaaggcactgacattttatagctcaacaggaaaagcccaaatacctatcccttccagacaatgaatgtcatttaattactatttccatgatagtaagtgatatagtaaaaaataattatattttacttctttagctgttggaaagtcctgtcccacagaatttagcattcatctgtcagatataacaggaacagaacagatttctccattgtcccaaaatctccacccttttaaaaaggagaagaactgaacttttgttaaatctttttaattcaatgtacctattacactttcttgtaaaaatgtattccttttttgcagccataatggaagagggtttttcccttggtagtagttatactactaagtcctgaaattccatctgaaatcatccgaaaaacaaacacacctgagaaacgtactacacaagctctggggcaaaaaaaataaataaaggcttttaaaaaatggaatagaagattacatataccatttatattctgaagtccaactctttctagtattacttataaaatttattttctgaagtccgactctttccaactttgggtatactttgtcttcaaagtataaaataacaatctctaatcataggatgtatttcacggttaatcaaaaatttaggctgaaaagagtaaacatatcttttcaagctaacaaactcaggaatcagcagtgctgactggaacacagaaaagtctaatgcaacaatcagtgcaggtcatcctatcacctgggacatcccttaaccctattctgttcgccaccctcctaggagacactcaccaccctcctaggagacactgccttgtgtgcttttcaggatcttgcactacctcaaagggcaggttctccagtccttagatataactttctaccttttaagtctgagagagtccagaaggcaaaaatcatttccgttttttttcctatggaatatgaccatgaaattggctgttcagtcatgtgtctccaaggaatggaaactagggttgggaagaaaaggtgagtgtcccaggagttagctttttacaggaattatataccagaagattcctcccatcccagtggatccagttgctccccagggggccacaccttccatctcaggctgtcccctgggaggagtgacccaggggatgatattcactagaccctccaagagacttggcagctgtggacatccattttttttgagacagggtcggcctctgttgcctaggctgggatgcagaggcacgatcatagctcactgcaacttcaaactcctgggctccagccatcatcccacctcagcctcaggagtagctgcgactacaggtgccagctaccaagcccagctaattttattattatcatttacactagagacaaagtcttgccatgttgcccaggctggtctggaactactgggatcaagcaatacctctgccttagcctcccaaggtgctggaattacaggaatgacccaccgtgttcaggaacccaaaacaattctttcaagaaaaagccatacattgctagctgaaaacaagatgacaaactagtgaaatatcgcctggggccaaacagttcatactgttgctgtgaattaaggacagaaggttagcctggggaagtctctggaaaccaagagatttgctgccagccctaggaagagtcaggatgagagaacacagtggtggatttgagaccctgctgcccacgtctttggaagactcagaggggaaacggtcgcccttggaaaggaagaaaggactgaggaccacggaaaccacagctcctcccacacacaaaccccacacacgagtctggattccacctggtgactcgtcgtcaccgtgcagcctcctcaccgggttcacaggaactgcgagccaggctggaggcgagattgcagttagatattaaacaggtgccctcagccccgctgcctcaaggggccgcctccctgagagtcaggtcacagcagacgctgaccgccggcttccccattgtgcctggggataagatctccgagtgctgctcaagagtcgccggagttctcagatcctgaatcccagcagaaaggctggcgccaaccaggttgaagaccccacgagggagccctctcagcagaatgcggtttcttcacctcctgtcccaggattcacccctcacttccccaccaaccaaggacgctacacccagccgcccccgtccagaccccaaatccctcagggaggcggatctggggtgtcctcccctctcctcctgttaaaccgtttctgctgcagccctcggcgtctcggtgcagtgagtcgggccgcgaacctgtgttggttacagccgcacaatctggggagacccggggctgcgggctcggagctgcccagagagggcgccggggccgcagtcgccgcgcaggaacgggacaggacgcccggggtcccggctgcatgcccagccccaccctgcggccgagggccgacctacgccagggggacccgggtccgtagatcccgaagtcgcccttggggaggcccgggtccagccacagccgattacggccggttccacctaacccctcccccgcctcgggacgccggcccagcacacgcaccatttcccgacttccgcggtgtcccaggtcctaccgacagctcccgctgccaatgcgtgttccagccagacaaaggctgcctcagaacttccaggtcgtctctcagctacagaacccagagccgagcgcaggtgggtggagcagacgccgcgggctttttcaaccacacacacttctctgggcagtgcctgattgacagttcccacgaacccgccccacgcccctgattggatagggcgtcaggtcccgccccctgagggctgattgacagaagaagcgatcttgcacagctgagtggagccggatgagcaagttcctgacacagcccttggcagggggggcttcctccctgctctttgatctgaatcctcccgggttatatttgcacttaagcggaatttcctgcccgtactcaataggacctcctgcttcttcctcctggacacggactgacaaactaattatatctttttttttttttttcctcgagagggagtcttgctctgtcgcccaggctagagtgcaatggtgcgaggctcactgcaaccttcgcctcctgggtgggttcaagcaattctcctgcctcagcctcccgagtagctaggattacaggcacgcgccaccacccggctaatttttgtatttttcagtagaggctgggtttcaccatgttggccaggctggtctcaaactcgtgacctcgtgatccgcctaccttggcctcccaaagttctgggattagaggcgtgagcaactgcgcctggctccaattatgctctttttcaatgaaatttttcaagatttttcaatgtacaattaaattattttttactatagtcactctgttgtgctagcaaatactaggtcttattcattctttgtaactattttttatacctattaaccatccccacttcccccataactactcctcgctactacttttcgcagcctctggtaaccatccttctacacatttttggttgtttgagatggggtcttgctctgttacctaggctggagtgcagtggggccatcatggctcactgcaacctctacctcctaagctcaagcaatcctcccacctcagcctctcaagtagcttcagattgttcactgttggcatataaaaatgttattgatttttgtgtgttgatattgtatactgcaactttactgaatttatttctcagttctaatacttttttggtggagtctttaggtatttccagatataagatcatattatatgcaaacaaggataatttgacttcttccttcccaatatggatgccctttatttctttttttttcttttttttttttttgtcttattgctctagctgggacttcaagtactgtgttgaacaacagtggtaaaagtgggcattcttattgtgttccagatcttacaggaagggctttcagtttttccccattcattatcatgctagctgtgggtctgccatatatagcttttattatgttaaggtatgctccttctttacccacttttttttagggtttttatcatgaagggatgttaaatattatcaaaagctttttcagtgcacattgaaatgattatatggtgtttgccctttattctgttgaaatgatacatcacattgattgatttgcatatattgaaccatccttgcatcccagggataaagcccacttggtcatgatgaatgatctttttggtgtattgttaaattcagtttgctagtattgagttgaggatttttgcatcaatattcatcagtgacactggcctatagttttctttttctgacatgtctttgtctggttttggtgtcaaagtaatattggctttgtaaaataaatttggaagtattgccttctcctctgttttttggaatagtttgagtaagattggtattagttcttttttaaatgttggtagaattcagcagtggagccactgggttctggggttttctttgctaggagactttttattatggctttgatctcattatttgttattggtctgttcaggttttttatttcttcatggttcaatgttgctatgttctatctgcctaggaatttatcagtttcttctaggttttccagtttattggcatatagttgttcttagttgcattaatgatcctttgaatttctgcagtatcaactgtaatgtctcctttttcacctctaattgtatttatttgggcctggttttttcttagtctacctcaaggtttgtcaattttgtttgtcttttcaaaaaaccaactttttgtttcattgttcttttctattgtttcttcatttcaaattcatttatttctactgatttttattatttcttttcttctactgattttgggtttggtttgctcttgcttttctaattctttaagatgcattcttaggttgtttatttgaaggttttcttcttcttctttttttttttttgagatgagtttcacttcactcttgcagcctaggctggagtgcaatggcgcaatctcagctcactgccacctctgccttctgggttcaagcagttctcctgcctcagcctcccaagtagctgggattacaggcaccgaccaccatgtcattttttgtatttttagtagatacagggtttcaccatgttggccaggctggtctcgaactcctaacctcaggtgatccactccctttggcctcctaaagtgctgggattacagatgggagccactgcacccagcctgaaggtcttcttcttttttgatgtaggtgcttatatctataaacttccctcttagtactgcttttgctgtattccataggttttggtatgttgcattttcattatcatttgtttgaagaaacttttcaattttcttcttaatttcttcattgacccactcgtcattcaggagcgtattgtttaatttccatatgtttgtatggtttccagaattcctcttgtcattggtttctagtttattccacttattctgtgacacaatttatattatttcaatttttcggagcgttttaagacatgttttttgacctaacatatggtctatccttgagaatgattcctgtgctcaggaaaagtatgtgtattctgtagctgttggataaaatgtgctgtaaatatctattaggtccatttgatctatagtgtagattaaatcccatttaatctttcttttgtccaatttttcagtatatattgaaataatctttgttgatttactgtctggaagatctgtccagttctgaatatggggtgttaaaatctccagctattagtgtattggtgtctatctctctctctctctttttttttttttttttgagacagagtttcactcttgttgcctaggctggagtgtagtggtgcaatcttggcttactgcagcctccacctccaaggttcaagcaattctcctgcctcagtctcccaagtagctaggattacaggtgcccaccaccacacctggctaattttttgtatttttagtagagacggggttttgccatgttggccaggctggtcttgaactcctggcctcaggtgatccacctgccttggcctcgcaaagtgctgggattacaggcataagccaccatgcccggccctctctctttttacctaataatatatgttttctatatctgagtgctccaatgttgggtgcatatatgttcacaattgttacatcgtcttgctgaattgacctctttataattgcatagtgaccttctttgacttttcttacagtttttgtctcgaaatatattttgtctaagtattgctactcctgctctttattggtttccactggcatggaatatgtttttccattcctttatttccagtctatgggtttctttataggtgaagtgtgtttcttgtgggcaacagatcattaggtcttgtttttttaatccatttagccattctatgatttttgattggatagtttaattcatttacattcagtgttattattagtaagtgagaacttactcctgccattttgttatttgttttctggttgttttttcatcttctctcccttctttccttccatcctgtcttctttttagtgaaggtgactttctcttgtggtatgatttaacttcttactttttattttttgtgtatctgttgtacattttttgacttgaggttgccatgaggtttgcaaatactatcttataacccataattttaagctgatgacaacttaatgctgttgtataaacaaagaaacaaacaaaaagaaatctaatgaaaactctatgccttaacatcatacccgcttcttaacttttctttgtttctatttatatattgcttgtactgtctgtgttttgaaaagttgttgtagttattattttggatttgttcatcatttattctttctacttaagaataatttacggccaggcgcggtggctcaagcctgtaatcccagcactttgggaggccaaggcgggcagatcacaaggtcaggagatcgagaccatcctggctaacacggtgaaaccctgtctgtactaaaaatacaaaacattagccgggcatggtggcaggtgcctgtagtcccagctacttgggaggctgaggcaggagaatggcgtgaacccaggaggtggaacttgcagtgagccgagatcgcgccactgcactccagcctgggtgacagagcgagactctgtctcaggaaaaaaaaaaaaaaaagaataatttacacaccacagttacagtgttacaatattcttttttttttttttgagatggagtctctgtcgcccaggctggagtgcagtggtgcgatctcggctcactgcaagctctgcctcccaggttcacgccattctcctacatcagcctcccgagtaactgggaccacaggtgcccgccaccacgcccggctaattttttgtatttttagtagagatggggtttcaccgtgttagccaggatggtctcgacctcctgacctcgtgatccgcccacctcagcctcccaaagcgctgggattacaggcgtgagccaccgcgcccaggcttttttttttttttgagatggagtctcactctgttgcctgggctggaatgcagtggtatgatctcagctcactgcaacctccacctcccaggttcatgtgatcctcctgcctcagccccgctagtagctaggattacaggcacacaccaccatgcctggctaatttttgtatttttagtagagaccgggtttcaccatgttggccaggctggtctcaaactcctgacctcaggtgatccacctacctcagcctccgaaagtgctaggattacaggcgtcagccaccgagcccggcatacaatattatttttgtgtgtgtgtacttactaataccagtgagttttgtatcttcagatgattccttattgtacatccttttgtgattgatgtagttcctttagtatttcttgtagaataggactggtgttgatgaaatccctcaacttttgtttgtctggtaaagtctttatttctccttcatgtctgaaggatattttcactgaatatgctattcaaggataaaagtttttttccttcagcactttaaatatgtcatgctgctccctcctggtttgtaaggtttctattgaaaagtcttctgccagttgtattggagctccattgtttgttatttgtttcttttctcttgctgcttttagagtcccttctttatccttgacctttgagggtttgattactaaatgccttgaggtagtcttctttgggttaaatctgcttggtgttctataaccttcttgtggttggatattgatatctttctttaggtttgggaagttctctgttattatccctttgaatgaactttatactcctatctctttctctaccacctctttaaagccaatgactcttagatttgcccttttgaggctatgttctagatcctgtaggcatgcttcaatgttttttttttttttttttttttttttgagacggagtctcgctgtcgcccaggctggagtgtagtggcgcaatctcggctcactgcaggctccgccccctggggttcacgccattctcctgcctcagcctcccgagtagctgggactacaggcgcccgccacctcgcccggctaatttttttttgtatttttagtagagacggggtttcaccgtgttagccaggatggtctcgatctcctgacctcgtgatccgcccgcctcggcctcccaaagtgctggggcttcaatgttttttattctgttttcttttgcctcctctgactattttcaagtagtctgtcttcaagctaattctttctttcttttttttttttttttgaggcggagtcttgctctgtcgcccaggctggagtgcaatggtgctatctcggctcactgcaagctccgccccccaggttcatgccattctcctgcctcaccctcccgagtagctgggactacaggcacccaccaccacacctggctaattttttgtatttttagtagagacggggtttcaccgtgttagccaggatggtctcaatgtcctgatctcgtgatccgcccaccttggcctcccaaagtgctgggattacaggtgtgagccactgagcctggcccaagctaattatttcttctgcttgatcaattctgctattaagagactgatgcattcttcagtatgtcaactgcattttgaactccaggatttctgcttgattcttcttcttctttttttttttttttttttttttgtgagatgaagtctcactctgtcacccaggctggagtgcagtggcgtgatctcagctcaccacaaccctgcctcccaggttcaagcaattctcatgcctcagcctcccgagtagctgggattacagacatgtgccaccatgcctgactaatttttatattttagtagagatggggtttcaccatgttgtccaggctggtctggaactcctgacctcaggtgatccacccaccttggcctcccaaagtgctgggattaaaggcatgagtgactgtgcctggccttgattcttttaaattatttcaatctcttcattacatttatctgatggaattctgaattccttctctctgttatcttaaatttctttgagtttcctaaaacagctactttgcattctctgcctgaaaggtcacaaatctccatttctccaggattcgtctctggtgccttatttagttcatttggtgaggtcacattttcctggatggttctgatgcttgtggacatttatccctgtctgagcattgaagagttaggtatttattgtagtcttctcaatctgggcttgtttgtactcatccttgttgggaaagttttttagatatttgaaaggacttaggtcttgtgatctaaggcatctctacattaaggggcatcccaagcccagtaacactgtggttcttgcagactcttagaggtaccaccttgattatcttggataagatccagaagaattctctggattaccaggcagagatgcttgttctgttctctcttttcttttctttctttctttctttcttttttttttttagatggagtttcactcttgttgcccaggctggagtgccatggcacaatctcagctcaccgcaatctccatctcttgagttcaagcgattctcctgcctcagcctcctgagtagctgggattataggcatgcaccaccacacccggataattttgtatttttagtagagatggggtttctccatgttggtcaggttggtctcgaactcctgatctcaggtgatccatctgcctcggcctcccaaagtgctgggattacaggcatgagtcactgcgcctggcctggtctcttctctttactccaaacagcatgtctctctcttgctctgttctgagccacctggagctggggctggggtgacacaagcaccctggtggccaccatcactgagattatgccgggtcagacctgaagtgagcacagcagtgggtcttacccaaggcctgctgtaaccactacctggctaccacctgtgtttgctcaaggcgctgaggctctacaaccagtgggtggcaataccagccaggcttgtttccttcccttcagggtggcaggttcccccaggccctgtgtgggtcaagaggtgctatgcaggagccagtgactggagtaaaaaaactcagaagtctacctggtgttctaattgtactgtggctgagctggcactcaaatcatgagatgcagtcctttccactcttccctcccctttccacaggcagagaagcctcaccccatggccaccaccaccaaaggcccatggggagtactgccaggctactgtcaatgttctcttagagaccaaaggctcttgagtcagcttgtggtgaagctgcctggcctgggattcacccttcagtgcagtgggctcccctctggctcagggaaggtccagaaatgccatccaagatccaaggcctggaatcagggatcccaacaacccacttggtgcctaccccactgtggacaagctggtaccgaacatgcaaaagtctcttttgcttttccctcaacttttttcaagcagaaggagtctctccctatagccaccacagctgagaatgttctgagtttcactcaaggcctatggtgtactatcagggtattgctgctggttattcagggcccaaggactcttcagtcagcaggtgatgggtccttccagaactgagtcctttccttcaaggcagtgggtttccttctggcccaggatgtgtttagaaatgtcatccaggagctagggcctgcaaaggggacctaatgactatgactggtggcctatcctactgtggctgagctggtatacaaagtgcaagataaagttctctttactcttccctctcctcacctcaagcagaaggaaggggtctcttttggagccgtgagctgtgctgcctgggattgggagaggggtggcacaagcactcccttagctgccctaactgttgtcttactaggttacatgcccaccaagtccactggctctgagcccagctcagtactaggaattgcctcagagttgcagtccttgtggcctagacagcccttcaagtttacttaggattccagagcattttagcccacagtcgtgaggctcactggaactcaagttccagccactgggatgggtaattcccccctgactagagctgactatttatttatttatttatttacttattttgagatggagtttcactcttgttgcccaggctggagtgcaatggcacaatctcggctcaccgtgacctccacttcttgggttcaagctattctcctgcctcagcctcccaggtagcttggattacaggcatacaccaccacacccagctaattttgtatttttagtagagacgaggtttctccttgttcgtccggctggtctcgaactcctgacctcaggttatccgcctgccttggcctcccaaagtgctgggattacaggtgtgagccaccgcacccggccaaaactcaagttttttaagagagtgggcaggaagatccagctcaccttactagccactagagctgatttaaatgctccctctgtgggtgggcatcagctgaattcagcctggttttgctttctacttgttggtagaagagctgaggcaggactggcttatctgtcataatataaaagagtcttggaagatgtctggggtccagggtctaaaacccctcgtggcctttggaacaccaaactctgtgccaaggggtggaaggctgccctgccgcaccacaaatctaagcccagggcataaaacccctcatggcttggatggaatccagggcttagggcataaaacccctcgtagcctctggaatgtgcacagacttgttggttgctctcccaggttcgtaaacatgttctctattatctccaagcagcagagcatattatatatgcatcaaagaaaatgctaaaccatcacagatacgcttgatgcaccactacctttctaacctcacaccctcacctgtttacccctacgtcctcaagacctgcttctttgtttgatcaccaataaataatgtgggctcccagagctcagggccttcgcagcatccataccagcgttggccccctggacccaccttatgcactcttaacttgtcttttctcattcctttgactacgctggagtttgtagcccccacggcctggtgttgggtctgatcaccccaacatttctggcacccaacgtggggctacgaacactccggtgaaggaacactagagtgtgcggaagcggaggacacattgtcagaggacacccaaggacgactgaaagaagcttggtgggtaagctgagcactcagaagaaccaggttaacaatggaacagaatgaaagtaaatattctgcttatttaaatttcttaaggcatttattatggagagggggagtgaaagttaatactcagaacttattaacactctttgatacagtagagcagttttgcccatggttcccagaacaaaggacaatggagctagatgaatggggaagaattggcagaaattttaaaaacgcatataaagaaggagccaaaattccagtttctgtttggtcagtgtgggagttgataaaggcagttcttgagccatttcaaacagatgacaaggcagattcagatgaggaagaggtagatgagtgtaaaaaattaacttcagattctgaatatgaggaacagcaaccggaagaaattaaagaaaagaaatggaaactgaaaaaggtatattttactagcccttcggttccacctgctgaattaagtgaatggccacctcctccctctccccctaatgggtgagaagatgaattagctgtaaaacttaccgctccggtagctgcaacattaaaacctggagcaattggtgatgcgatataaaattttattcagaaggctagaactgaaggagacctagaagcatggcaatttcccattactataatccagagaggaggacagaatatagctagttgggccacctttccttttaagttgttaaaggaattcaagcaagccattagtcaatataggccaaattctccttttgtacaaactttactaaaaaatgtggctcttgataatagattaataccatatgactgggatactttaacaaaatctgttctcactccatctcagtgtttgcagtttaaaacttggtgggctgataaagctcaaactcaggcaagagaaaacacacaagcacagctgcctgtgcctgtttcctttgaacagttaatggggttgggccctaattggggccgattagacaatcaagcagtaatgaaaaatgttgccattgttcagttatgcactgtgtgcttacaggcatggaaaaaaaatgttacagggtaaaaatatccttctttcattagacctatgagagggaagactcatttggctgaatatattaaggcttgtgatggcactggggaaaattttagtccagctatggcttgactaaaggtgggaaaaaatatgccccatttctcaggctcttgttttaattgtgggcaatttggacacataaaagaggaatgtagaaaaggaaatcagaaggcaaaaactattgccatcaatcaacagaaaagtccaggtgtatgcccccaatgtaagaagggcaatcactgggcaaatcagtgtcattctaaatctagcaaagatgggcaacctctttcgggaaacgggaataggggcccaccttgggcccctcaacaaactgaggcatatccggcacagtcagtgcccttacaaacatacaacaattgtcccccgccacagcaggcagcgctgctgtagatctctgcagcacaattcccgtttccctacttcctggggagccaccaaagaacgtcccatgagagttaggagccctttaccctcaggaacagttggtctattgcttggaaggtctaatttaaatttaagaggtgtcgctgtacataaataattgattctaattataccggagagattcagttagttattagttcctcaattccatggtctgctttcccaggagaaagaattgctcagttgttactgttaccttatgcaaaactgggaagaggcacagtagaaaaaaaaaaaataggaggctttggtggtacgaatccagcaggaaaagctgtatattgggttaatcaagtgtctgataagagacctatttgtacagtaaccattcaaggaaaggactttgaagggttagtagatactggagctgatgtttctattattggtttaaatcaatggccccggcattggcctaagcagaaggcatccattggtattgttggagtaggggctgcctcagaattttttaaagttctttaattttgccatgccaagggctggatggccaagaagggacaattcaacctattgttacacctattcctgtcaatctatggggtagagacttattacaacaatggagtgctaaaatatctattcctatggatcagtataataataacagtaaacaaatgatgagaaaaatgggatatctcccagggaagggactaggaaaaaaaaaataaaaatggccaaccagaacctttagaactaaaaaggcaaacagatcgaactggatcagggtatcatttttaggagctgcaattgctgagcctccggctcccattccgcttgtttggttaactgccaaaccggtttgggtggagcaatggccgctgaaacaggaaaaaccggaggctttaaaagaattagtgcaggatcaattacaaaagggacacatagagcctactttctccccttggaattctcctgtgtttgttattaagaaaaaatcagggaaatggagaatgttaacagatttgagggctgttaatgctataattcagcccatgggctcactgaaccagggctgccctctccaacaatgatcccaaaatactgacctctcatagtaatagatttaaaaaattgcttttctaccattcctttagctactcgagattatgaaaaaattgcttttactgttcccactataaataacaaagaaccagcggacagataccattgaaaagtactgccacaaggcatgttaaattgcccgactatttgtcaaacttatgttggaaaagctattaagctagttagagaacaattcaaaaaatgttatattatccactacgtgggtgatattttatgtgcagctgaaactagggaggattaatgctatgctacaaacagttagaaaaggctgtaactgcagcagggttaatcatagcccccaataaaatccaaacttctactccctttcagtatttacgaatgaaagtaaaacaaagtactattaaacctcaaaaagttcaaattagaagagataatttatagactaaataattttaaaaatcattaggagacattaattggatttgtcccactttaggcattcctacttatgctatgtctcacctcttttctaccttacgaggtgattctaacttaaacagtaaatgctccctgtccaaagaggccttagaggaacttcaattaattgaagaaaaaatttcttgttttattccattagtgaggacatctaggatgatgatgaatagcagtggtgagaggaggcatccttacctcgttcctgatctcagtgggaaagcatctagatatcaaaattaagtatgatcttagcttggcttctttttagaggttctttatcaagtgggagaaatttgcttctatctgctattaggtttatggacctgagcatgccacctaatcattgcttttcccttttctttctgtaaaaaatccctcagaattcatataaagttgcgagtttcaggttggttggctctgactgatcacctgtattatggaccatctgtgtgattatggggaaaagttcaggacaccagcaacctacattggataggaccacctctgactccagggattgccactcaatctttctgagattagcacccacatccaacaaggtaattttgcctaagaccctggtgggaaccaacggccttgtgatctcaagattatccctttgacatgctggtaagcagcagtactacagaaaacaatgtagccccctggctacttgttttgctttggaagaacagttgagttacatcctctcatgctttggaaaggattgataccaaatgtaccttcttttctttgctcatcagtgcctgaccatggggtatcatggatgtgcatgtttcaatagcctcccactcaccccattggtgagagaggaattagggccctagggctatttaggtaggctaacacatgatatccatcactggacaaatgcaactgacaacagtttattagtcatatatattcacagcccagatgaggagggtaccataagtcatgcagatccacaaagaaaatgtatttgggagcagagggcccaaacatggctgtgggaaacaggctttgtagtatcaaaagggtgaggtaccccttggttcccctgggaggatgtgattcacttctttgaataatgtgtgggttagcaaggatctgaaaccccttatacaagagacaaagactatataactatgctataatagtataaaactgtattatgcattatagtataatagtaattatatattttagttatacataacatataccagttatgttttatatatacaattatatatcattatgtaatatattacatattatatacacaaatatatctataaatgtacatgtaaacacactataggctatactagataatgctatactacatagtagaaaatggtccagaaatatctcttttgaatatagctgcagaggcccgacaaaataccagcaaattgaatccagcaatatataaaaagacctatacaacatgaccaagttggattgagctcagaaaagcaatgttggtttcgcatataaatatatattaatataccatatttacagaataagggatctattatcataggatcatcccaaaaggcacagaaaatgattttttttttttttagacagggtcttgctctgtcacctaggctggagtacagtggtgtaatcatagctcactgcagccttgaactcctgggctcaagtgatcctcccacctcagccttctgagtagctagggctacaggcatgcaccacaacactcagcttatgtttaaatttttctgtaaagacgaggtcttgctatattgcccaggctgatctcaaactcctggcctcaagtaatcctcctgcctcagcctcccaaagtgttggaattataggcgtggctcacacctggccaggtaatgaatatgacaaaggccaataccattttacaatgaaaatactcaatagagtacaaataggatggaactttctcaatgtgctataaggcagctatgagaaacagctaacatcatacttgatggtgaaagattgaacgctttttatcttagatcaagaacaagagtgtctgcttttatcacttctattcaacatgttaaagaaggtgctaccagggcaattaggtaagaaaatgaaatgaaagcactccagatattaaagggcatacatacatagcccctcagacagacatacaacatcgcacagacttgatcactgcacatacaggtggacaaacccagacacagacacacaaacttccaaacttacaaaccctcagtgattaaagccctagatacaccaacagatgcccccagagacatcaacagcccaggccctctgcaatgttccccagcttcctttccctctttaggactaaccaccatctgatacatcatgtgattttgcttgtatctcatttcttgcctcctagaatgtcagcttcaagggaacactattagctaaggtttgttcactatgaaacctacaaaggacatgttacatagaagagtttaatatgtattgaattattggggctctctgtcacacacatacacacacacccacacacctcgttatagggccacatccatttgatcttaagagtgaattgttaggccgggtgcagtggctcatgcctgtattcccagcactttgggaggccgagatgggcggatcatgaggtcaggagatcaagaccatcctggctaacacagtgaaaccccatctctactaaaaatacaaaaaaattagccgggcgtgatggtgggtgcctgtagtcccagctactcaggaggctgaggcaggagaacggagtgaacctgaggcagagcttgtagcgagctgaggtcacgccactgcactccagcctgggtgacagaacgagactccgtctcaaaaaaaaaaaaaaaaaaaaagagtgaattgttctcacttccatcccatgtggcagaaaaagtgtgtaagtattgcaaaacaaattttaaaataagttttaaaatatgaatattttaaaaggatataattatacaaaccttgcaatgttcttctaagtttaaagtttttggctgggcatggtggctcacgcctataatcccagtattttgggaggctgaagcaggtggatcacttgagctcaggagtttgagaccagtctgggcaacatggcaaaaccccatctctacgaaaaaagaaaaaagtcagctgtggtggtgtgcacctgtggtcccagttacttgggaggctgaggtgggaggatcacttgagcccaggaggtggaggttgcagttgagccaagattgcactactgcactccagcctgggtgacagagcaagacagtctcaaaaaaaaaaaaatttttttttttggcagtgcccagtacaggtggtggcacacattaggacttcaaaatccagagattccatgattctgagttacgtgagtttgggtaggatcctgtgccctgtacttaactttcttcatctgtaagatgggagaactgattggttgagcaatcaaatgagatacttataattatgaaatcacagtgctaagtactaacataagttaccactgaaaaaaaatggacaaagattttatttcctttgctcaaatttagtaagacacaaatattttactttccccccactcttcccaaacatgtgaataccaaattgggatctggggactttctggaagcattgaaacaaaaagattcaaactactactcttgtaagaaggcattaaatttttccttatatgatgacaccaaatattcttcctttccattaaattaggctattatgcaaaatgattccctgtctgcagctcacctccattattccttgaaaattaccctctaaacatccatagattttttgggtggtacatattgggtcattcagtctgcacaacagcaaaatgatcatgtcaaatatccaaggcaacttaagaatctttaaaatgacattaaacagaaatgtaaacatcatcaacacctgtggcccaaatcaataggaaatctcaaatcctaaatactcatgtccaaattcatgatcatgctttacatgtctcaaaaattttatccattataaaaataaagatgaaccatatctacacctttgtttatggggaatcattactgttcatcccagggatgtaggactgtattgttccccagcatacatcaaacctgagcagttcctcagtgttttaataagatatgttagataggccaggctcagtggctcatgcctgtaatcccagcactctggaaggctgaggcaggtggatcacgaggtcaagagattgagaccatcctggccaacatggtgaaaccccgtctctactaaaaatacaaaaattagctgggcgtggtggcacacacatgtagcctactcaggaggctgaggcagcagaatcacttgaacctgggaggagggggttgcagtgagccaaaatcacgccactgcactccagcctggcaacagagtgagactccgtctaaacaaaaaaaaaggccaggcgcggtggttcacgcctgtaatcccagcactttgggaggccgaggcgggtggatcatgaggtcagaagatcaagaccatcctggccaacatggtgaaacctcgtctctactaaaaatacaaaaaaaaaaaaattagctgggcgtgatggtgggcgcctgtaatcccagctactccggaggctgaggcaggagaatggcttgaacccaggaggcggaggttgcagtgagccaagatcacactccagcctgatgacagagaaagaccctgtctcaaaaaaaaaaaaaaaagatatgttagataatggaaataaatgatcaatgacaatattggaggtccctaccctccaaagctaaggtatccaacacaaccatagcttccctattaatctcacaggttggttgttatttcatttccttcaaagatcttaattgctttctaaaaaccaaatcctcaccttttattaaccatctctcttttcccaaatctataagcaacaggaaggcaagaacttgtttcatgtttctatatccatagcctacaatgtcttgattatttgtgctgaattgtgtatgctttgatactacagtgccaggcctatgagaaaggttaaaaaaatcagcatcaagagcaagatggcttgatttgaacagtgattctgtctttgcaccttgctaggtttgtggtctctgaaaacttatctacacttacaggactctgctagtgcacaaaagagaaaaaaaagtatatagtttgctaaagactcagtgaacttacatattttgactgagatattttgtggaaaacattgtccaatacaccataagaaatatttccatgtttagataataagaaaggttaagagcagttccacaggactaggatctgacctcacactcagataaggccaagtcttatcctgttgaagagaaaaatgtcacatttccttcatcagacaaagctactcagcaatcatgatggatcaagacaaaaacaataaccatgtctctaaaaatggtaaaagagaacagagttgaagccattaaaatgaccaaaattgccctctactcactaatccaagtgagtggtttcttaggaattaggtttagctccacttcattcttcctgcctctagataagaattatgattaccagtgacacaattaagttcacctcacagcaggcaacacacacaggagtgtctcagtttggtgattagcaatcaagtcacccaacaaatccaaatccaaaaagaagttgttttgagaaggagtcttgctctgtcgcccaggctggagcacagtggcgtgatctcggctcactgcaacctccacctcctggggttcaagcaattctcctgcctcagcctcttgagtagctgggattacaggtgcacgccaccatgcccggctattttttatatattttttagtagagatggggtttcaccatgttggccaggctggtctcgaactcctgaccttgtgatctgcccaccttggcctcccaaagtactgggattacaggcatgagccactgcgcccagccgagcaccctcttactgatactccccagagtcatttatggtttatgatcattcttattcctacaattcttaacactcttctcttgactacaggtgtgatcctggtgatctttgaaaaaaaggcactgaaacaaccatgatttaagtttttggtattatgaatgcatgagaaattttctgggaaaaaatcataactatattaagaataaaaaataaaaaattcctaaggaaaatacttgatcttgtatgcacataatattgactcagaatatatgaggattaactcaataaacttaaaaacttaatctgaaaatcactggattaagaaaatgtggcacatatacaccatggaatactatgcggccataaaaaaggatgagttcatgtcctttgtagggacatggatgaagctggaaaccaccattctcagcaaagtatcacaaggacaaaaaaccaaacaccacatgttctcactcacaggtgggaattgaacaatgagaacacttggacacaggaaggggaacatcacacacgggcctgttatggggtggggggaggggggagggatagcattaggagatatacctaatgtaaaagacgagttaatgggtccagcacaccaacatggcacgtgtatacctatgtaataaacctgcacgttgtgcacatgtaccctagaaattaaagtataataataaaaaaacttaatctgaaaatctataattgcaatggaatattttaatatatccttgcagaaaattaaatagacaagtgatagcatacaagttatttgaaaagttaataaaatatttctaagaaacatctacagaagcttttgttcaacaaaaacatacacatggtttttaatcacatataatgaaacaaaattgaaaatgtactgagagatgacattcaactgtaataggaaacaccgacaatctgcttgatattaggaaggtgcttattcttacactgtaggactgggtaagtgcattccctgcacagtgcagtggagaagcagacacccatgtagttctttttgactgcaccactgtagttgtcacggtggaatcagaaacacatagtcactggtactgttaacaaaacatggtgtttattacataaataataccttggataaattcaacctagagatgaggtgagtcagagcatcagagaatattcccaaccttaagagtctaaatggttgcctggtggacacattagagtttctaggaaaatccaaactgcagtgcatctttgagtagaacttttgaagacaatttgtggaaaactacatctttgaaaatatggcagctggggccatgcacagtggctcacgcctgtaatctcagcactttggaaggccaaggtgggcagatcatgaggtcaggagtttgagaccagcctggccaacaatgatgaaaccctgtctctactaaaaatacaaaaaaaatttagctgggcttggtggtgggcacctataatcccagctacttgggaggctggggcaggacaattgcttgaacccagaaggcagaggttgcagtgagccaagatcgtaccactgcactccagcctgggcgacagagcaagactccatctcggaaaaagaaagtaaagaaagaaaagaaagggaaagggaaagaaagaaggaaggaaggaaggaaaatatggcagtcaagcagttagtggtggttctaagaatactctcaattggcagagcaaaggatcaggacaatgtggtggaagcaggtgtccctgaagctcctatgcatccatctgtctccacatatggtggctataaaacctgactaatgctttcttcacttctgccttccatatctcctgcaagtaggctattggtgaattataccgtggagccataaaaggttagattatagaaaacataggtcacaacataacccatgttaacacaatccaggacagccatttccagctataggttatatggttctatctcagatctctcttattaatacaaagtctattattcaaatcacagccagaaggaattacaaacagcaaacagaagatgaaaataataattccaatgagagagtatactgtatgataaactttgcagactcaaaaatttattatgattattttttagcataaaaaatagaaaaaagggtactctgtcttcctctaaaaaagcctcttttggtcagaaagatgaaatacatataatgatatctagtacctgccacataaggccagtaggaaatcctaaaaattaccaaattgtcattttttgatggcccattacagcacaactaaaaaatacataaaaatcaaaactgctagcttattataaatacacttcaattcactcatgaatctaacagacttcaatatggaaagacaaaatttcagaaactgatttaatgaaaaaatactatcaattcaacttgtgtacaactgtataagagcttacagaattatctcatctcagtgttcttttgtgaaagtaatagaaatccataattcagagatccattttaagaatcagtaactgataatatgttttatcacatttctgacatgttgtgaattttctagaacaatatacatgaattaatttgcatcaggctttcccatattatctacatttatacagtacctccctagtgggagtttcaacatgagattgaagtttcacacataagggagtatcacatgagcatttgttaaaatggaaaacattgctatatctcacttttataggatttctatccagtctgcattctcacatattagtatgtgggccaactgaaggctttctcacaatgtctatatttaagaagtcgctttccagtgtgagtttgttcatggtttccaagtaaactaagacaaataaaggtttttctacattttttacatttatagggttttccacattctttacatttttaaggttataaattctttacatttatagggcatatgaaaattctttacacttcatatgccttctcatggtccttaaaaggtcatatgaccattgaaggttttcccacactgcctacattcgcagggtttcctgtccagtatgaatgcttcctcatattcacatgtaaataactgaaggtattcccatgtcttatagggtttctctgaaatatgaataatttcatgtcttcaaaaggaaatgggggccgggtgtggtggctcacacctgtaatccaacactttgggaggccaaggcaggtggatcgtctgaggtcaggagttcgagaccagcctggccaacatggcgaaaccccatctctactaaaaatacaaaaattaagtgggcatggtcgttcacacctgttgtcccagctactcaggaagctgaggcaggagaatcgcttgaacccaggagacagaggttgcagtgagctgagatcactctactgcactccagccagggcaacagagtgagaattcaactcaaaaaaaaaaaaaaaaaaaaaggaaataggacaactgaaaactttgccatattgcttatatacatagggttactctccactatgaactctttcatgtattcgaaaggaacgggaacacttgaaggctttaccacattgttgacatgcatagggtttctctccagtgtgagttcgttcatggattcgaaaggaacgtgagcaactgaaggctttgtcacattgtttacattcatagggtttcactccagtgtgagtcctttcatgcattcgaacagaactagaacaactgaaggccttaccacattgtttacactcataaggtttctctccagtgtgagtcctttcatgtattcgaatggaactggaacaactaaacgccttaccacactgtttacattcatagggtttctccccagtgtgagtcctttcatgcattcgaaaggaactggaacaactgaaggctttaccacattgtttacattcatagggtttctctccagtgtgagtcctttcatgcatccgaaaggaactagaaaaactaaaggctttaccacactgtttacattcatagggtttctctccagtgtgaattctttcatgcattcgaaaggaactggaacaactgaaggctttaccacactgtttacattcatagggtttctctccagtgtgagtcctttcatgtattcgaacagaactggaacaactgaaggctttaccacattgtttacattcatggggtttctctccagtgtgagttctttcatgcattcgaaaggaactggaacaactgaaggctttaccacactgtttacattcatagggtttctctccagtgtgagttcgttcatggatttgaaaagaactaggacaatcaaaggctttcccacattccttgcatttataaggtccatttccagtgtgcattatcatatgtcttcgatagcttggaagagaaatgaatgctttcccacattccttacaatcatagggtttctctcctgtatgaattctttcatgttttctaaaggaactaggaaaactgaaggctttcccacattttttacatttatagggtttttctccagtgtgaatcctttcatgacttcgaaaggatgtgggacaactaagagctttaccacattgcttacactgatagggtttttccccagtgtgagtcctttcatgtatttgaaaagtttggtaatatctgaaagcttttccacattgtttacattcatagggtttctctccagagtgagttctttcatgatttcgaaaagaactgggatgactgaacgttttcccgcattctttacatttatagggtttctcccctgtgtgcattctcatgtgtcctcgaaaggttgtgtgataaatgaaggccttcccacattccttacattcataaggtttctctccagtatgagttctttcatgtatttgaaaggaactgggccaactgaaagccttaccacactgtttacatttatagggtttctctccagtgtgagttctttcatgtattcgaaatgaacttcgaaagctgaatcttttcccacattccttacattcatatgatttctctccatatttgtgatattcatatgatctatgttcagtatgagatctcatgtgcctattaagagatgaatgacacatatagtcctttccacacacactacattcatatggttttactctagtaaaagttttcttgtttggtttaggatttggagtctgactgatggtttctccaaactgactaccttctttcctttcacagagcctctctaccatatgacttctgtgagaaaaaaacaaaacaaaacgcacaattagtggctttttaaaattaataattttataattattgattatttcacaatcattagtaggtagtagaattacacttttgccattttcagggaaagtgtatgtcatgaatgctcaggaagagtacttgaccagagctattatcaaaacaataaaattcatcacatagagtttatttctttttttttttttttttgagacagagtcttactctgttgcccaggctgcagtgcagtggcacaatcttggctcactgcaacctccgtctcctgggttcaagcagttctcctgcctcagcttcatgagtagctgggattacaggtacccaccaccacacctggctaatttttgcatttttagtagaggcagggttttgccatgttggccaggctggcctcaacctccacacctcaggtgatctgcccaccttggcctcccaaagtgctaggattacaggcatgagccaccatgcctggccaaaattcataatatagagtttcttaatattgtttccaggtgaaatatttttcaaatactgaacatctgtaccatttttaagaaaacgttcttggcaaaaattttcaaaaaataaataaatatgaaatggggcttatttgtttcaattattcattttttaaacctaatggcatgctaagattctctcataagacagtattttcttttgtaagtacaactcaccttagctttctcccctgatttttgtgatcttcaatgttcttctcctcccagttttcccctaaaatgcaggcccagaaaaatcattaaacctattcgaaattacagaaaaattattagattctaaatctaggatgagctgttatcctgtctgatttatttaccaaagtattccctttcaacattctaaaccttggaaccttgctgatgagcaagaaacacttgttctctaattgactaagtgagggaataatttcattcttacctatagaggccaagttaacaaaggtttcttgcatcacatctctgtagagtttcttctgagagggacccagcaaagcccactcctcctgggtgaagttcacagccacatcctcaaagaccactgagtcctgaaacatcccacatgtataggggaggatgggtgagactgacagcactggggatataaactcagttcattaaaagttcatatataattttctccatttatcctgtaactttgtcatcagaactcaaatcttcgtccacacttacttcttcataaatttaacaccaccatgaatacttggaaattatttctacatttttagtatgatcacttcaagtcttatgctctccaatgacaggatacacagcatcttagagaaatgctatacgatactctccctctccctctccccacggtctccctctccctctctttccacggtctccctctgatgcagagccgaagctggactgtactgctgccatctcggcacactgcaacctccctgcctgattctcctgcctcagcctgccgagtgcctgcgattgcaggcgcgcgcgccgccacgcctgactggttttcgtattttttttggtggagacggggtttcgctgtgttggccaggctggtctccagctcctaaccatgagtgatctgccagcctcggcctcccgaggtgccgtgattgcagacggagtctcgttcactcagtgctcaatggtgcccaggctggagtgcagtggcgtgatctcggctcgctacaacctccacctcccagctgcctgccttggcctcccaaagtgccgagactgcagcctctgcccggctgccaccccgtctgggaagtgaggagcgtctctgcctggccgcccatcgtctgggatgtgaggagcccctctgcctggctgcccagtctgggaagtgaggagcgcctcttcccggccgccatcacatctaggaagtgaggagcgtctctgcccggcggcccatcgtctgagaggtggggagcgcctctgccccgccgccccgtctgggatgtgaggagtgcctctgcccggccgcgaccccgtctgggaggtgaggagtgcctctgcccggccgcaaccccgtctgagaagtgaggagaccctcctcctggcagccaccctgtctgggaagtgaggagcatctccgcccggcagccaccccatccgggagggaggtgggggtcagcccccgcacggccagccgccccgtccgggagggaggtgggggtcagcccccgcacggccagccgccccgtccgggagggaggtggggggtcagcccccgcccggccagccgtcccgtccgggagggaggtggggggtcagcccccgcccggccagccgcccagtccaggaggtggggggcgcctctgcctggccgccccttctgggaagtgaggagcccctctgcccggccaccaccccgtctgggaggtgtacccaatagctcattgagaacgggccataatgacaatggcggttttgtggaatagaaaagggggaaaggtggggaaaagattgagaaatcggatggttgctgtgtctgtgtagaaagaagtagacatgggagacttttcattttgttcagtactaagaaaaattcttctgccttgggatcctgttgatctatgaccttacccccaaccctgtgctctctgaaacatgtgctgtgtccactcagggttaaatggattaagggcggtgcaagatgtgctttggtaaacagatgcttgaaggcagcatgctcgttaagagtcatcaccactccctaatctcaagtacccagggacacaaacactgcggaaggccgcagggtcctctgcctaggaaaaccagagacctttgttcacttgtttatctgctgaccttccctccactattgtcctatgaccctgccaaatccccctctgcgagaaacacccaagaatgatcaataaaaaaaaaaaaaaaaagaaatgctatacgattgaagcaaatatttccagtttaagaccaacaattccttgtaagaaaaatactttttatctcctgctttatcatgtactatatcactcagcatcccatgaaacacagggtcaaatctgtacgagattttttttttttgagacagagtcttgctctgacgcccaggctagagtgcagtggcgcgatctcagctcactgcaagctctgcctcccgggttcacgccattctcctgcctcagcctcctgagtagctaggactactggcgcccgccactatgcccggctaattttttgtatatttagtagagacggggtttcactatgttagccaggatggtctcgatctcctgacctcgtgatccgcccacctcggcctcccaaagtgcttgggattacaggtgtgagccaccgcacccagccacgagattttaatgaataagtatatactgaagaactgtacattttttcttctattcccatgattacactgaaaagccagagggcccgtgcaacttgcaacaacatcctgctggccatgttgtaccgaagtactgcagaccattagaattagtcagatccaactggtggagtgaaaatattcttttagtgaaatattaattttaacttgtttgtataatatttatcacagacccagtgtttcttttttctccctgtcccatttgatggaggcaggaggttactgggatgttagagcacaggcaggaggaaaaaggcatggcaacttagatcataaaaattaaatcttcaccaggcgcggttgctcacgcctataatcccagcactttgggaggctgagaagggtggatcacgaggtcaggagatagagaccatcctggctaacatggtgaaaccctgtctctactaaaaatacaaaaaaattagctgggtgtggtggtgggcgcctgtagacccagctactcaggaggctgaggcaggagaatggcgtgaacctgggaggcagagcttgcagtgagccgagatcgcaccactgcactccagcctgggtgacagagcaagactctgtctcaaaaaaataaaattaagtcttcaaaaaatccccacactcatgagcctcaggactgcgaccactgttagcacacataggatggagatgataagatgccagaacagctctttccctcagaaacctaacagtgtaccctgagacttaacgaatttgagtaacaggttaacagtttcaatttgcaagggagttcacccaagtccacaatggtttcatactgaatttgcccatgattacaaaattcaaagggttcagcagtgctgtcctccaaaaggatatgaaattccctttctccaatttcagaaagaagtgatccgcaaacagctactctagaggctggccatcctcccaacgtctctcattttaggctcccgtgaggtacgtggtggcatgagatcccgacaccaaagcataggaatccctcagtggcataattcccctaaatcttggcctttgaaaaagatcattaacctactgatgtccatatgcaaaggacagaaaaaatgctcccaaacagcaatcctgatactagaatttacctatttggtaaagtaacagaaatatccacacctttcttgttgttgggtcaaaggagtaaaatgagctgatcacgtaagttctaattgttccttgtacagtggttctatggcacttgttcaaagaaattcctactacctagtgtgcagaagactgttaacattagtaaaatgttaacctaagactacttatctttaaatgcctgagggtatatattcaattcataaaaagttcacatatgattctgtggtctccaaacatttgttgtccttcactgatatctgggaagtgagaatttgggagggaccccgccaacctaagtgataaagagtggcttagtgtgtggctgggtgcagtggctcacgctgtaatcccagcactttgggaggctgaggtgggcggatcacaaggtcaggagatcgagaccatcctggctaacacagtgaaaccccgtctgtactgaagatacaaaaaattagctgagtgtgatgtcgggagcctgtagtcccagctactcgggaggctgaggcaggagaatggcgtgaacccgggaggcagagcttgcagtgagccaagatcatgccactgcactccagcctgggcaacagagcgagactccacctcaaaaaaaaaaaaaaaagagtggcttagcgtgcctaaatggtttatggaatcaatagagtatatattgaactccttttttccttcttagagtctggactttttcacatgccaggcagaggatgcctacttgatccgccccccaaaagcactgtgagcactgggtctctaatgagcttccctagcagacaatatatcatatcacaacttgttgcttggggaattgagcccattccatgtgattacatcaggaaagaacatttaaaggcttggttgcatctgctttcctccacaccaactatgactaaataaggctaataaaggatatttaataatcctaattttaaaaatgttattgggtaatgtcaaagcagaattaaattaaggtggaagttggtacatgttctcagaacaaactcagtgtcaacaagatgccactgctcccaaatgatatctttataaaattctacaaatccctaaaatagacttataaaattcttaaaatagacttataaaattctacaaatccctaaaatagtcaagaaaaactacttttccaaacctaagaggaacaataaatgtcaaacaatgggtaaagtcttttgaagagcaacataaatacttgcctagtatgtatcaaggattttcaaactattaacactccaaacagcatgacacacagagagctaaatagaacaagggaggggaaaagtgtcttcaatggactggcatttataaggaaaattgattaatgatagagcaaccattgtagggtagtggaagagatcactaacacttcaatatatgcagaagggacacactgttgtctaactggaaaaagcattgcatcagctcttttccatagacaataatcaatttaatgtagatttaaatgtgaataatataattaaaactgtttcaaaagtcacaggcaaacttttttaaatgcaagagtagggagaattttctcatgtaagagtaagccataaaggatgagactgaaaagttcaaacatactaaaatcaagaaagttaaaagacaaatcacaaagcaggaaaaaaatatgtgacatacatgcaatataaatgaactagtatgcagagtaaaaataaatgaacagtcaggcatgatggctcacacttgtagtcctagctactcaggaagctgaggcaggaggatcatatgaacccaggagttagaggctgcagtaagctatcacaccagcctgggtaacagggcaagactctgtcaataaataagtaataaaatagccaaataaataaaaagtgaacacatgatttaaaaacggaaacacaggccaggcacggtggctcacatctgtaatcccaacactctgggaggccaaggcgggtggatcacctaaggtcaggagttcaagaccagtctggccaacatggtgaaaccccatctctactaaaaatacaaaaattagccaggcatggtggtgggcacctgtaatcccagctacttgggaggctgaggcaggagaactgcttgaacccgggaggtggaggttgcagcgagcccagatcgtgccactgcactccagcctcggcgacagagcgagactccatctcaaaaaaaaaaaaaaaaaaggaaaaataatgaaaacatatttaagagaggatgacacaccatatatatgaaaaaaggtctggctgggcacggtggctcacgcctgtaatcccagaactttggaaggtcgaggcgagcagatcacttgaggttagaagtttgagaccagcctggccaacatggcgaaactctgtctctacaaaaaatacaaaaattagccaggtgtggtggcacgggcctgtaatcctggctactcaggtagccaagacacgaggattgcttgagcatgggaggtggaggttgcagtgagccacgatcgcgccactgcactccagcctgggtgacagagtgagactctgtctcaaaaaaaaaaaggaaaaggtacatctcgctccttccttgatacagccaaatgaaataccaaatagatccaatttcttacatattagaaggacaaaaatcagtcaattagctactcccaagtattgatgaccactgccaatagacaaatagttatgcatgaatggaagaaagatcaactgatacactccattgctatttcctgtatatttgaacttgaccataatctatagcacagtgatttttctccaacatccagagaagttattgtgtatttgtacttagacacagataccaaaacaataggatcagtatttttcacaagagcaaaaaatgaactggaaaaagcccaaacaccaccatcaatggattggatgataaaattggattcccccagcctgtcactatcatgtgaaacacagaggcaaaaccactcaaaaaccttttcattgttaattccactaatactcatgtatttaaagttcaaataaggctcaactaaaagaacatcacatagtgaaatggaagataaaggtataaagaataatcaaataatcaagactgtggccatctatgaagcaggatggagataagccagaggagaacatcaatagactaattaatgactgaccaaagctcacctataaatttatatttttaaatcacttattgaggcaatgattgacatgaaaaagttgtacatatttaatgtatacaactcaatgagtttggggataagtatacacctatgaagccctcagtatcataaggacatagacatattcatcacaaaagtttctttcccccttcattattattactatttgtgtgtctctctatgtgttaagaatacaacataatatctattttagaaattttaagactaggcacagtggctcacacctataaccccagcactttgggaggccaaggtgggaggatcacttgatgccaggaattcatgaccagcctaggcaacatagtgagatcacatctctagaaaaaaatgtaaaaatcttaggtgggtgtggtggcatttgcctgtagtcccaggtacttaagaggctgggacaggaggattgcttgagcccaggagtttgaggctgcagtgagccacgattgtgccattgcactccagcctggataatggggcacgatcccatcttaaaaatgaatacaaatttttaaacatttttaaaaggaatgtttaactataaaatcattgtgttgttagctataggtactatgccatatagtagatcttcaaagctcatttatctgcataactgaagctttgtattcttcagcttcatctccccatttcccccttcccctgcaaattaccattctactctatgcttctatgagtttgattattttagattacatatataagtgagactacaaagaatgtgcctttctgtttggcttatttcactgagcataatgtcccctacgtccatcaatggtgttgtcaatggcaggatttcctttttttaaaggctaaatcatattttattttatgtaaacatcacacattcatctgttgacacacatttaggttgtttacatatcttggctgttgtgaacaatgatgcaatgaacatgggagtgcacatatctcttcaagatgttgatttcaattcctttagataaatatggagaagcagagtgctggatcatgtagcaattccttttctaattttctgataaacatctatgctattatccataatgcctgtatcaatttaaatttaaacttctaccaacagtataccaaggttcccttttctctaaatcctcaccaacacctgtaagactataaatatatgtcttagcagaaaccttggatgtcaagagagtgggacaatacattcaaagtgttaagctaattagcaacacaaaaagatatgaaagtataaaactcatgggtaaaggcaaaagtatagtcaaatccagaatattcttatacataatggtggtacaaacatcactttcaactctagtataaaagctaaaagatgaaagtatttaaagtgactatagctaccataacttgtaaaatggacactgaatattaaaaagatgtaaatcctggccaggcacagtggctaacacctgtaatcccagcactttgggaggctgaggcaggcagatcacctgaggtcgggagttggacaccagcctgtccaaagtgacaaaaccctgtttctactaaaaatacaaaaattagccgggcatggtggtgggcacctgtagtcccagctacttgggaggctgaggcagaagaatcgcttgaacccaggatgcggaggttgcagtgagccaagatcgcaccactgtactccagcctgggcaacagagtgagattccgtcttaaaaaaaaaaaaaaaaaaaaaaaaatctaagcatctacatgaggaaagcaagaaaatatgagcaaattaaacccaaagtaagcacacaacagaagaaatagtaaaaagagaaattaaacaaaaccaaaggtgtttctttgaaaagatcaatatatttgataaatgtatggttaagctaactgaaaaacagagaacagaaattactaatatcacaaatgtaagtgggaaaaataaaaatgaaaaagctatgggcaaaatccaacatgcatttatgataagaaactggagatagactttcctctttttgagaagcagtatttataggaaacctgcagctaatatcatatttaatagtgagaaaatagatgctttcctggtaagatgaggaaatgggcaaagatgtcccctcttaccactcctactcaacagattgtactcaaagtgtaactaatgagaggagaggggaggagaggagagaagagatatagattgggaacaaagaaatatcactgtctttgtcgcatgtgacatgattgtctaagtagaaaatctcaaagaatccacaacaaactcctcaaactagaggttgaggatataatcttaatatacaaaagtcaattgccttcttacagactcacattagtatagtatagactcactgagtcatctgattttcaacaaatgaccaacagcaattcaatgaaaaaagatagcctttttcaacaaacagtgttggaaaaactgaacatccacatgcaaaacacaatgaaaaaaacacaaatctagaaacagacgttacaccttaaacaaaaactggctcaaaatggatcacagaactaaatgtaaaatctaggccaggagcagtggctcatgcctgtaatcccagcactctgggaggccatggcaggaggatagcttgaagtcaggagtttgagaccagcctgggcaactaagtaggaccccatctctacaaaaaatacaaaaattagccaggtgtggtggtgcacgcttgtagtcccacctactcaggaggctgaagtgggaggagtgcttgagcccaggaggttgaggctgcagtgagccaagattgcactactgcactctggcctgggcaagagggagaacttgcctcaaaaaaaaaaaaaaaagtaaagttataggatactaaaagttaatgaagaaaatctaggtgaccctgggtttggtgacaaatgtttagatataagcaaaatccatacaaaataaatcagtaagtttgacttcattaaaatgcaaaagctccttctctatgaaagctctgtgttaagagaatgaaaaagactctagagccttttgcggtagggggacccacttaaggtgggccaatttgcaattaacagcataaagtggttaagtaaaatttataaacaaggaatatgttgcctccagaacatcaaaagaacctagaagatgctgtgggtagtcagagggacaatagctatttcatagtagtgtcagggatggagcggccctccttttaccaaatggtttttaggaacttaaccaaaacataaaggtctcttattttatatatggggcaatggactttttgtaagctctattttttttttcagtatttatgtgtcctgaatgaatgccaaaacaatgtcctcagacaaggctgtcattaatgtaatatcatacctgtgttctagagaaaggtggatgcagttcagattttgcctgcaaagactgtgcaacagcaaggctgttgaggttcccttgggaaactaggtaaagttatataattagcctgtgagatggtgaaatctgtgagatcagctggatggtgtcagtaatttccatgttggatattggtataggggcttaatgggtgggaccacagcattaaggttatggtaatccattgtgggttgccattcattctctccaagtttaagaaaggccaaactgtacttttaaaacgagaagcacggggaataatcacttcctcactaaacaagttttacataatacttttcaacccttcaaggccctgttcaatttatattgagccatcataactaatttaactggggagtaagttccacagggtctcattctgtcaagccagtttgtaagtgccaaagatttaatttaaatttcacttatgactcactggtttagagtttacctgttcattctggcgtattttaggacactgggtgccatgaacatggggaatttaggcacagttatgatggctaagatgagacatacttatttgtcttctattttatattcagtaactcccttaagattatcaggggataccttgcttaaattttagtgggtctcccaggtataaccataatttgagcccttgtattggctaatcctatagtgtgttaattaatacattacataagatgttaaaattaatacagaacctatgatatagaggctcttttatcttttttgccgtctaaattcctttagtctatttggaatttccaattgggtcaaattgtggacctctttttcagcatttttttcttttgttcctttccttcctaacatgtttgttttgtttttgtttttgtccctggatatattttgacagcaaaatcctctctacaggggaggggtgttcttttccctccagagagccacaaatcactattatcaggcttaggggcctgtccctcatggttgctttataaagtttaagcacctgggccttaagctggctttgaatgaaccctttgcaatgctgcagaggaaacatgagtgtgccctataatcctgagggtcagcatccttgctgcaatagagcaacagcagcaacacttaagggtccttgggagccctgtgctattaggagtgtggactcggcccaccatctaacagctgcctttccccctctcttttgtctctttttcaaaaatgactgctctggcaggtagtctttcccatgagcaccttgtatgccaggtcagcagcagtcacagcttcactctaaaacacacagataagtccaggccaagaaacactacccaggaccactttaaggagtatcaaatctcatattcctcttcaaaaaagccaaggaattatcaaaacggccaactccagttggctaaacatagaacccagacttggcagggctcaacatgcagcacagagtagcacaactcaaagtagtagcttcccagaaagcagcagctgaaagtgcatgctggccatcaggcaacagagcaggtagcaattcagtgcaagagaagacagacccatggggtgacagtcaatgtctgaacaccatgctcatggtaacaattcctgtgtcgttccaatgttgacactaataacagcgtggagaacagacaccaaagggtatgaaaagactcactactgtgatcattgaggtcttggggaaagcagggcaggctgcccaagcaggtgtgacatagcttcagagagcaaagaaagcctcctggcctgggtttttattgtagtttgggggtggggctacaagagagtacctgctcaagggcaggagcttctgtggtttgaatttcctgctcccagactttttcagcttgcccaggtgtgcagcacgaggagaagagagaagggtgacgcttatgatgtgcacagccaaaatcaaaacatgcagagtccaactactcattacagaaccaacatgagtatgaaaaacatgcatttgcaattgcttatttttataaaaagaaacactgacagtatgcttaagaaattattaaaaggccaggcacagtggtttatacctataacaccagtgctttgacaggctgaggcaggaggattgcctgagcccaggagttcaagactagcctgagcaacatagtaagactccatcactacaaaaaatttaaaaattagctgggagtggcagcacacacctgtagtcccagctactgaagaggctgaggtgggaagatcacttgagcccaggaggttgaggctgcaatgagctatcatcatgtcattgtactccagcctgggcaacagaacaagaccccatctcaaaaaaaataaaaaattatcaaaagtgagtatttggggggtggctagagcaagtgccctggctggactggaccagaatatgctggcagtgagtcttttcaagttagactcaactattgtggatttttttctaacttccacatgcatgatttctttaaaataaacagctaaatttaaataagccatattttactacttaataatcttcatttttaatcaacttacttttgctttttaaattttgattaaaattttctacgtatgaaacaatcctaagacttaatccaggccgggtgcgatggctcacgcctgtaatcctagcactttgggagaccaaggcaggtggatcgcgagatcaggaaatcgagaccatcctggccaacatggtgaaacctcgtctctactaaaatacaaaaaaattagccgggcgtggtggtgcacgcatgtagtcccagctactcgcgaggctgaggcaggggaattgcttgaacctgggagtaggagactgcagtgagctgagattgtgccactgcaccccagcctggtgacagagtgagactctgtctcaaaaaaaaagactgaatccagctgggtgtggtggctcatactagggaattttggtaagccaagttgagaggattgcttgaagccaggagttcaagaccaatctggtcaagagagtgagaccctgtctctacaaaaaagaatatatatatataattaggtgggcatggtggctcatgtctgtaattctagttacttgggaggcagaggtgaaaggagttcagggctgtagtgagttatgattgtgccactgtactctaactaggacaacagagcgagaccctgttttttaaaaaaaaaacaaacaaaaacttaatactttaagcactgacaattacaaaagtgaaaaactttcaaatctctttctaactataatgacaaggtgcattattatgtgtcctaccatctcacactgggaggtgctattgggaaggagtagcatattataatgcattagcattttatcttaagtatgttaggattttcaaatatatatataagctttgagtagttattctaccaaataaagaagttcaggccaggtgcagtggctcacgcctgtaatcccagcactttgggaggccgaggcgggtggatcatgaggtcaggagatcaagaccatcctcgctaacacggtgaaaccccgtctctactaaaaatacaaaaaattatccgggcgtggtggcgagcgcctgtagtcccagctcctcaggaggctgaggcaggagaatggcgtgaacctgggaggcagagcttgcggtgagccgagatcgcgccactgcactctagcctgggcgacagagcaagactccgtctcaaaaaaaaaaaaaaaagttcaattgcattttcctttcagttccagtggaaattcatttgcaataggaatcatatggactttgaggttttttcgtttttgtttttgtttcttgagacagggttttaatctgtcgcccaggctgaatgaagcacactgactcaattttggctcactgccacctctgcctcccaggctcaagggatcctcccatctcagcctcctgagtagctgggactacacccagctaaaattaccacacttggctaatttttttttttttttgtagagacagggtttcgccatgttgcccacgctagtctcaaactcctgggctcaagcaatccacctgcctcagcctcccaaagtgctgggattacaggcatgagccacgatgcctggcctcttttaaatttccaagtactctatgacatgcacatacaaaaaccgatctaaaaatgaaaaatgtacctgagaatgtaaatacattcatctcttatcttgaggttctcttgcctaaaagaaacaaatattctgtttggttccagagttttctttttttttgttttgagatggagtcctgctctgttgcccaggctggattgcagtgcacaatctcggttcactgcaacctcccctgcaacccggggttcaagcaattctcctgcctcagcctcccgagtagctgggattacagccacccaccaaaaattacatgtctggttaatttttatatttttagtagcgacagggtttcaccaagttggccaggctggtctcgaacttctgacctcaagtgatccttctgcctcagcctcccaaagcgctgaaattacaggcgtgagccaccacacccggcctggtttcagaattttcttgccttagttgcatcatacctttcaatcgacttacattttcaaacccaagaaacaaaatttaacacactcacatatggaataacattaaaaagtgttaacagaaactagaattcagctgctgtaatagtcagcaaataaaggaatccaaagggaaaaaaaaacaccagcctggacacagtgaggatctacaaaaaatttacaaattcaggtgtgacagtgcacacctgtagtcctaggtacttgggaagctgaggtgggaggatcatttgagccaagaaaggtgttcgaggttacagttagctatgatcacaccactgcactctagtctgggtgacagagtgagacactgacttaaaaaaaaaaaaaagggaaggaaggaaggggaaagaaagaaaggaggaaggaaaggaagaaggaaaggaaaggaagaaggaaaggaaaggaagaaggaaaggaaagggaaaggaaagccaagccacatctgtaatcccagcactttgagaggccaaggtgggaggactgtttgaggccagcagtttgagaccagcctggccaacaaagtgagaacccacctctaaaatacacacacacacacacaaacacacacacacacacacacacacacacgctccctctccctctccctctctctctccctctccctctcaagtcagctcagactagcagactgcttctccacaattcagaaggaaaacccacactcagaaagctaaacacatacacaagcttggggcccacattcttgctgttgggcaacaacctttagagtgagacagtccctggtgacagagggcaggggcacctgaggagccaaaggaatgaactcagcgagctccacacattccctcacccctggtgacagggaaatcgccccttcaattgttgtaagtgaggaaactctcaactggactgagattaaggttctgacccaaatgaactccccagttcattcatcctgtgtccaggagacagatctcctggcctttacagactttctcactatagaaaaattacactgagtgcacctacacaacagatgcaaaactcaaacctaatgtctaaaaataggcccaaggaaaccacaattatgccctcaggaagggcatcactggattcagccaatcccccaacgtgcattcagatccccagctttccagtgctcagcagcttctctcagtacaaagggctccttccacagtaggtatgagcaggtaggacacctgcaggggaggctccctaggaagaaacaactgggccttcgattacatcccttgggagacccaagggttggtcttagagcttggagtcactgacctgagtcctctttgctctccagtcaagtgacctggaccactactgatatttacatgagacaaaccctgtgtttgaagaaatcaaaggggaggctgaggcaggtggataacctgagcccagaatggaattccatttgaaatcaccgaaaaggaaagaacagacctgaggaacttgctatacattctcagaagaaaaaaagagaaacaaaaatttttaataaatgcaatatcatactgggatatttcattattattattttctgtttttgagacaaggtgtgagaccttgctcagcctggagtgcagtggcatgatcaaggctcaaagcagcctcaacttcccaggctcaagcaatcctcccgcctcggcctcccaagtagctgggactacaagtgcaggccattacgcccagctaattttttttttttttttttttttttctagtagagatgaggtctctctatgtcacctaggctggtcttgaactcctgagctcaagcgatcctcctgactcagcctcccaaagtgctgagattacaggcgtgagccaacgctcctagcttgatattttattattttctgaaacccatctctttcttgcctctttggaaatattttacatccactctaaaggtttattttattttatttttttatttttttgagacagagtctcactctgtcgccgaggctgtagtgcagtggcgcaatctcatctcaactgcaacctctgcctcccgggttcaagtgattctcctgcctcagcctcctgagtagccgtgattacagatgtgcaccaccacgcccggctaattttttatatttttagtagagacggggtttcgccatgttggctgggctgtaggtctcctaattacgtatattttacattttttgagaatcaattaagtgagtaaatcttttcaaggtgataagcccagggaggggaagtgctgcgctggaaaggacagatctcccagaaaagtttccaaaaaggagactcaacccaaaggagttcccataggatgtcaggtcccaggagagatactggcaagagaggcacaagcattttacacgaggtagcttcaagtccttctcctctgttttcctctcatataaataccccaaagcatacgttaaatctttttaaaagaaccatccattcctctgtacaaaaaggataattaaaatactgcgtctggttgaaataacgacgttgtgaactggagagaagacattggcatttgaaagagatctagaaatttagggatttaatcccagctctgggaagagccaggctggaggacacggtcgtgggtttgagatctggcttcccatacacttggaaaccttgagaaacgagtcctcccttgggaagaaaagagggactgaggaccccacacaacactgctcctcccacgcacgaaccccacgaccgagacgggattccctccatgaccctcccgtgccccagcacaatctggggagacgcgaggctgcgggctcggagctgcccagagagggctccgggactggggccgcagtcgccgcgcagggacttgacaagacgtccggggtcccggctgccggcccagccccatcctgcggccaaagagaccgagggccgagctgcgccaggaggactcgggtccacagacccgggagacaacggcggggaggcctgggtcccaccacagccagatccggccggtttcaacccgcccctctctcccatctcaagacccccagccccgcacacttaccatttcccagactctgggatgtcctggtgttctgtttacctctcccgcggccagcacaggtcctacctccacctgaggcccttcctccacctgagggccttctggggtgaggagaccccagagcggagcgcagcggctggtagccacgccctcgccgtttgcgcagcgcccctccgcccgccttcccggcggcgcccctgattggacattgcactcttggacccgccttcgttgcctgagtgacagctagtagggaagtcgcgtctctaagcaacctgcattcgtccggggtcaggaatctgttcccctgccacggatatttgcgtctaagcagaatttgttaacgtacccggggtcgggcactggtgtcttcctgcagctccttctgagcgcggagacacaagcgtgcacagcgcaggaaattccaggctcagtttccagaaaaaggctctttgtccacagcgaaaaaggacgcccgggccatgccagactagaacggaagggtcagacgctcccagacttagcataaggctgcgaggccattcatggatttctgactcttgtttacaaatacagacacttagagtgacagagtgacctcatcatacctaacaaagagtgactacgttttaatctttgacaactgacagggtttaggccgtcacccatcccttccctccccccacactttgctctagtgggaagtttggaccccacagccctagtctgagagaaggagttcctttttttttttttttcggtagagatggcggtggtggggtggtctcactatgttgcacaggctagtctcgaactcctgggctcaggtgatgctccttggcttcccaaagtgttgggattacaggcatgaaccaccgtgcccagtgaggaattattcagttaaacccaaagccatgagatgtgttcagtaaaactgaacactggaaggatatttatttcggaccagtttttgactatgtccctagagaacttttgtggatcctttatgtttgtttggtttgtggtttttgtttttgagacagggcccttctttgtccctcaggctggaatgcagtggtgcaatcagagccccctgcagcctcgaccttctgggctcaagcaatcctcccacctcagccacctgagtagctggaacctcaggcacgtgccaccatgcttgactaatttctttctttctttttatttttattttgtagaaacagcatctcactatctcacccaggctgatcttgaactcctgggctcaagtgatctgctggcctcagcctcccaaagtgttaggattacaggcatgagccactgcacccagcccctagagaattttgaaatgtaaatggctatgatatcgataaggcaattaattccattttcactgagattatttaaaaaaccacaaaagattatgtaaatttggcatgtactaggaaactcaatatacttaagatattggatcaaacctactaatgggcagggcatgatggctcacacctgtagttccagcactttaggaaacttaggtgggagggctgcttgagcccaggagtttgagatcagcctgggcaacatagtgaggcccccccctcccccatctctaagaaaattttttaaaaattagcagggcatggtggtgcacacctgtagtcccagctactggggaggctgaggcccgaggattgtttgaacccaggaggtcaaggctacagtcaactgtgatcctgcattccagcctgggtgacagagtgagaccctgtcagaaggaaggaaggaaggaagggagggagggaaggaaggaaggagggaaggagggaaggagggaaggagggaaggagggaaggagggaaggaaggaaagaaggaaggaaggaaggaaaaaaaaaggaaacccctgtagcctttggctgtcactgtcctatcttcccatcttcctcctccaagcctctgtcctaagcaaccattaatttactttcagttgctatatagctttcccattgtagacttggaatggaatcatatactatgtgttctttgtgagattaacttcattcacttagcataactgtttcaagggacatttacattgaagtttgtatcaatacttcatttgttgtttacagtaaaacaatatttcattgtaccaatatagcccattttgtttatccattcatccattaataggcatttggtttgtatccaccttttagttgttattaataaggttgctataaacatccatgtacaagtttttctgtagacataggatttcatttgtcttgggaatacacttaggaatggaatcgatgggttacatggtaattctatctttaatctttgaagagctgccagactcttctcctctcctttgggaaattctattacacacatattggtcaactaaatagtgtcctgcatatttctcaggctctgttcatttttctgttttctgtttttgtttttttaagatgtaatcttgttatgttacccaggctggactgcttcagcctcccaagtaagtgggactacaggtgtgcactagcatgcccagcttaaagaaataatttctattttgatatgacacctgcagatccccctccctcccccaaaaaatctttttttttttttttttttttttgagacggagtttcactcttgttgcctaggctggagtgcagtggcacagtctcggctcactgcaacctctgcctcccaggtacaagtgattctcctggctcagcttcccgagtagctgggattacaggcacctgccaccatgcccagctaatttttttgtattctttatagagacagggtttcaccatgttggccaggctggacttgaactcctgacctcaggtgatccgcccacctcggcctcccaaagtgctgggattacaggcctgggccaccacgcctggcccgaaaaatcttattctccagttatctcctgaaaaacagtaggcctacagtctacactatatcttgattaaattcctagatctcttcccaattgattttcacttcttttttgaaacagactctcaccctgtcacccaggctggactgcagtggcgaaatctcagctcactgcaaactccacctcctgagttcaagcgattctcctgcctcagcctcctgagtagctggggactacaggtgtccgtcaccactccagctaatttttgtatttttagtagagaccgggtttcaccatgttggccaggctggtctcgaactcctgatcataggttcacgccattctcctgcctcagcctcccgagtagctgggactacaggcgcctgtcaccacacccggctaattttttttgtatttttagcagagctggggtttcactgtgttagccaggatggtctcgatctcctgaccttgtgatccgcccccccttggcctcccaaagtgctgggattacaggcgtgagccaccacgcccggcccactcctccactcttaaccactattctcttttacaattttatacctttgcctttttcagaatgtcatataaatggaacacaaagtagtcttattagtcctgttttcaaatttgacgacttatttgtaaacattgatacagtacctgcagtgttctgagtttttttgtttttttttttttttgagacagaatttcactcttgttgccccagctggagtgcagtggcgccatctcagctcaccacaacctccgcctcctgggttcaagcaattctccggcttcagcctcccgagtagctgggattacaagcatgcaccatcacacccggctaattttgtatttttagtagaaacggggtttctccatgttggtgaacctggtctcaaactcccgacctcaggtgatccgcccgcttcagcctctcaaagtgctaggattacgggtgtgaaccacagtgccctgccaagttttctatttttgacagtgcccagtacaggtggtggcacacattcgaacttcaaaactgagagattacggggctgggcacgatggctcatgcctgtaatcccagcactttgcttcagcctccccagtagctggaattgcaggcatgtgcaattttgtatttttagtagagatggggtttctccatgttggtcaggctggtctcaaactcctgaccacgtgatccgcccgcctcggcctaccaaaatgctgggattacaggcgtgagccactgcgcccggtctatattctggttattaattccttgtcagatgggtagtctgcaaatattttctcccattctgtagcttgtcttttcactttgttgtacagaagctctttacttaatgtgacccctttatctatttttgctttggttgcctgtgcttgtagggtattactcaagaaatctttgcccactccaatgttctggagaatttccctatattttcttttagtagtttcatagtttaaggtcttagatttgagtctttaactgattttgatttgatttttgtatatggtgagagagaggtctgtttcattattttgcatatggttatccagttttcccagtctctttattgaagagactgtccttttcccaatgtatgttcttggcacctttgtcaaaaatgagttcaccatagatgtatggatttatctctggcgtctctattcaggagtttaagaccagcctggccaacatggtgaaaccctgtctctaccaaaaatacaaaaaaattaactgggcacagttgtgtgcacctgtagtctcagctactcgggaggctgaggcaggagaaccgcttgaacctgggaagcggaggttgcagtgagccgagatcacgccactgcactccagcctgggtgacagagtgagattccatctaaaaaaaaaaaagacggagagattccattagcactgtgggctataggaatgtaggcaagaccttgtgctccctatacttcaaatttttcattcataagataggacgtatggttggatggggctagtcaaatgaaatactaatgattatatcacattaatttccaatgacatatagtgagatgcatatatgtcattgaaatgttggacaaaaattaggttttaattgctctctagtaaaacacaaagctgttaactttttttttttccatcttccctaacgtgtgctggaggtctaccatatggaaatgatacctgcggacagtttcatgggcttttgggtctttgtggatcattgaaacaaaaattacccagctacttctcttgtttaaaaaagcattaaagattgaaaatgtcaaatatactttttttttttttggtagagacagagtctcgctctgtcgcctaggctggagtgcagtggcaaactcggctcactgcaacctccgtctcctgggttcaagcaattctcctgcctcagcctcccaagcagctgggactacaggtgcacaccgccacatccagctaatttcttttgtattttagtagagacggggtttcaccatgttgcccaggctggtctcaaactcctcagcccaggcaatcaccagcctcagcctcccaaagtgctaggattacaggcgtgagccaccgccgccagacatataccttatttttaactaaattgggatgaaaatcaaaataataccctctgtctgtagcttgctgcaattctaacttggataattgccctctaaacatccatagttcttttggatttgtcaactgggaaatcactgtggatttggctagatatcaccctgttcatcggaaaaacctgagatggtttgcactatgcagatgactgttacctttctccaaactgggaagaactccatggttttctgattacaatttgtgtcattcagtctccagtaaatgcaaaattataatgtcaaatagatgagatcaatggaatagaattgaaatcccagaaataaactcatatatatatatacatacatatatatatatacatacatatatatatatatgtatatatatatatatatatactcaaatgactttcaaaatgctgccaagaatatgcaaagactattgttttcataaattggtgctgagacaactggatagccacatgcaaaagaatgaagttggacccctacatcacccaatatatggtaattcactgaaatagatcacagaccaaaacataagaggtgaaattataataatcctaggaaaaaaaggtgggaaatattgataatcttggatctggcaaagaattcttacatatgcaggccgggtgcagtgtctcatgcttgttttcccagcactctgggaggccgagggggccggacagcctgtggtcaggagtttgagaccagtctggccaacgtggtgaaaccccatctgtactaaaaatacaaaaaattagcctggcatagtggtgcatgcctgtaatcccagctactcaggaggctgaggcaggagaaacacttgaacccgggggggtggaggttgcagtgaactgagatcatgccacttcactctagcccggatgacagagtgagactccatctcaaaaaataaaaaagaatccttacatatgcagccaagtgtggtggctcatgcgtgtaatcccagtactttgggaggccaaagtgggaagatcacttgaggtcaggagtttgagaccagcctgggccacatagtgagaccctcgtctctattcaaaaaacaaaaggaaaaaagaattcttacatatgacagcaaaagcaaaaattgatgtgtgtgtgcaatagaatacacacacacacatatatatacacacacacacataatttgggcctcataaaagtaatagcttttgtgcttcatagaacactatcaatatgttgaaccaaccctgcacccctgggataaatcccacttggtcacgatgcattacatttttaatgtgttgttgaatttgcaaatattataatcctatatctggaaaaaactaaagactccaccaaccagcactttgggaggccgaggcaggtggatcacgaggtcaggagtttgagaccagcctggccaatatggtgaaaccctgtctctaccaaaaatacaaaaattagctggtcatggtggcatgcacctgtactcccagctactcaggaggctgaggcagaagaatcgcttgaacccaggaggtgaggttgcagtgagctgagatcgtaccactgcacttcagcctgggcgacagagtgagactctgtctcaaaaaaaaaaaaaaaaaaaaagactccaccgaaaaactattagaaatgataacccaattcagtaaagttccaggatacaaaatcaacatacaaaaatcagtagcatttctatatgccaacagcaaacaatctaaaaaagaagtcaataaagtaatcccatttataatagctacaattaaatacctaggaattaacttacccaaagaagtgaacaatacctacaatgaaaactataagacattgatgcaagaaattgaagaggacaaaaaaatgaaaagatactcatgttcatgcattggaagaatcactattttttttttttttttttttttgagacggagtcttgctctgtcgcccaggctggagtgcagtggcgcgatctcggctcactgcaggctctgccccccggggttcacgccattctcctgcctcagcctcccaagtagctgggaccacaggcgcccgccacctcgcccggctaattttttgtatttttagtagagacggggtttcaccgtgttagccaggatggtctcgatctcctgacctcgtgatccgcccgcttcggcctcccaaagtgctgggattataggcgagtcaccgcgcccggcctagaatcactattgttaaaatgtccatactaaccaaagaaatctagagatttaatgcaatcccaatcaagataccaatgacactcttcacacaaatagaaaaaaacatcctaagatgtatatggaaccaaagaagacccagaatagccaaagctatcctaagcaaaaagtacaaaactggaggaatcatattacctgactttaaattatttaaatatgactataaatcatattatctaactttagagctacagtaaccataatggcatggtagtggaataaaaacagacacaaagatcagtggaactgaatagagacgccagagataaatccatacatctatggtgaactcatttttgacaaaggtgccaagaacatacattgggaaaaggacagtctcttcgataaagagactgggaaaactggataaccatatgcaaaataatgaaacagacctctctctctcaccatatacaaaaatcaaatcaaaatcagttaaagactcaaatctaagaccttaaactatgaaactactaaaagaaaatatagggaaattctccagaacattggagtgggcaaagatttcttgagtaataccctacaagcacaggcaaccaaagcaaaaatagataaaggggtcacattaagtaaagagcttctgtacaacaaagtgaaaagacaagctacagaatgggagaaaatatttgcagactacccatctgacaaggaattaataaccagaatatagaccgggcgcagtggctcacgcctgtaatcccagcactttgataggccgaggcgggcggatcacgtggtcaggagtttgagaccagcctgaccaacatggagaaaccccatctctactaaaaatacaaaattagcggggcatgatggcacatgcctgcaattccagctactggggaggctgaagcaggagaattgcttgaacccgcgaggcggaggttgcggtgagctgagatcgcaccattgcactacagcctgggcaacaagagcaaaactccatctcaaaaaaacagaaacaaaaacaaaataaaaaaaaaccccagaatatataaggagctccaaaaaaatctatagaaaaaatctaataggccgggcgcagtggctcacgcctgtaatcccaagcactttgggaggccaagacaggcggatcacgaggtcaggggatcgagaccatcctggctaacacggtgaaaccccgtctcttctaaaaatacaaaaaaaaaaaaaattagctgggcgtggtggcgggtgcctgtagtcccagctactcaggaggctgaggcaggagaatggcgtgaacccaggaggcagagcttgcagtgagccaagatcacaccactgcactccagcctgggcgacagagcgagactccgtctcaaaaaaaaaaaaaaaaaaaaaaaaaaaaaaaaaaatctaataatcggattaaaaataggcaaaaaatctgaaaagacatttctcaaaagaaggcatgcaaatggcaaaccgttatatgaaaaggccaacatcactgatcatcagagaaatgcaaatcaaaactattatacaatgagatatcatctcacccctgttaaaatggcttttatccaaaagtcaggcagtaacaaatgctggagaggatgtggagaaaagggaacctttgtacactgttggtgggaatgtaaattagtacaaccactatagagaacagtttggaggttccacacacacaaaaaaaataaaaatagagctgccatttgatccagcaaccccacttttaggtaaataccccaaagaaaggaaatccatgtattgaagagagatatctgcactcctatgtttattgcagcattattcacaatccccaagatttagaagcaacctaactgtccctcaacagatgaatggattaaaaaaaaaatgttccaaatacacaatggagtactattcagccataaaaaagaatgagatcctgtcatttgcaacaatttggatggaattagaggtcattatgttaagcgaaataagccaggcacagaaagacaaacttcacatgttctcacttatttttgggagcaaaaaattaaaacaattgacctcatggagatagagagtagaaggatggttaccagaggctggaaagggtagtgcgggggttgggggaaggggaagtgaagatggttaatggccacaaaaaatagaatgaatgagacctagtatttgctagcataacagggtgattatagtaaaaaataatttggttgcacatttttaaataactaaaagagtataatcggcttgtttgtaacacaaaggataaatgcttgagttgatggattccccatttaccatgatgtgattattaggcattgcatgcttacatcaaaatatctcatgtaactcataaatatatacacctactatgtacccacaacaaaacttaaaattaaaaatgtaaacattgcctggtctctgtgaacctacggggtcacagttctgagtgtcctggcagcatgatgccaagccactgtcctctggagaatatctgactctcctgatccagtatggccttgcctccagggcccttttgctgtggatttactcctcaaagagtcagtcatcaaggggttcgctttatctggaaactcttgtctggcattccctgcgcgcacacctatgtccccgttcagaagcttcttcggtaaacgccagtgtccggtctgagggcctttatatctagcatataaagttctggtataatgcaaatgtctctggcaggacagtttcagggacaaaagtggaagctggatcgctcagctacctgacctccgtctgagatgtgactcaggcaacagggggtggaacctcacaaactgtccaattggagacgccgccggagcggtgggtggggccgccctgtacaaaggcgcgtggatacggtggcgcgatttccagtttgtgtctctcctgcctcgaacgtcgctaggtggctctgccgcagcctctgtcgctctgggacccgcactggcagagggagtcgtagttagggggtggggacaccgcggaagcccggaaatggtgactgtgcggggcctggaatcccgagacctgaagagctgctggccggaaccggctgtcgcgggaaccgggcctgcccgcggccactcctgggtctgtgaacccgagtccccctggcgtagctcggccctcggcctcctcccgccgcagagtgaagctgggccggcagccaggatcccgggagtcctgtcctgtccccgcgcggctactgaggcccgggtcccggagccctgtgtgggcagctccatgcccgtagccccgcgtcttccaagattgtgtggggatcacgggagggtcataggagagaaggaatcccggctcgagtgtggcgttcgtgcgtgggaggagcggtggtccgtggggtccccagtctcttctttttccccagggggaccggtttgccccttaattttacaaacgtgtgaaaacaggatctcaaatccacgaccccgttttccagcctagctcttcctaggactgacaggaaatccctaaatttgccaattccttctttcattccaaatgaagctttccctctccaattcataatattattatttgccctgttaaatacaatttgtaggaagccattggtttagactgagctcctgcactagacccaacagaccaaaccaaaatgagttacccacggggacgttcctcgctaccaagctgaaactaagttgtttatctgaccttacaaattatcaggagagaaagagatgctggtcaaatccccaacaggccagttttagccaacatgataaagaaagtcccctctgctttaacttttaccagaaaagcaactttgaaagttcccgtctttcaactgggcgtgatggctcacgcctgtaatcccagcactttgggaggccgaggtgggtggatcatttgaggtcaggagttcgagaccagcctggcgaacatggtgaaaccctcgtctctactaaaaatacaaaaattagctgcatgatggcctgtgcttgtagtcccagctactcagggggctgaggtgggaggctcacttaagcccaagccctggaggtcgaggctgcggtgagctatgatctcgccactgcgctacagcctgggtgacagagggagaccctgtctcaaaaaaataaacatcaatagcggttgaaagccccatgactggggagcagcagccagagactagtgacttcaagctaagaccactcttgagcctgcaaagggaggtcattgaaagcccagatgggtcttcctggggagccttccccaaaagtgtcctacttgctctcacccaccaaggaaagagctctttatacagagagaagctacagagcactggaatgctgggaaccgcacgcggttttaggagaaccgggagggttttaattgtctaggttgtaattgtagtttccttgggtctacttttagacattaggtttgagttttgctttcacattagggtacactcgtggtgtaatttttccatattgaaaaagtctgtgaaagttacaagttctgtctcctggacatggtgttaatgactttgggagttcatttgtgtcagaaccttcatctgaatccagctgacagtttcgtcacttacgagaaccagtgggaaggggcattctctgctcccggagttcattcctgtggctgctcaggtgtccctgctgtcaccagggactattccactctagggactataccctaacagggagagagtgtggactccaagctttggtatgtgtttaaccttctggatgttggtttttcttctgaattgcggagaagcaggctgcttatctgagctgattcaatgtttgtgtttctttcctttggattcctttttctattgaatattgcagcactttaactccagtttcctttaacattttgtaattttattccctgtatgagtctgtaggatttttagtttgttggtctttgaaaatttaagttgattgagaaatatgatgtaagagaagcaaatcctggaaccaaatagaatttttattcctttcaggcaaaagaagctcatggtgtgagatggatatgtttaacttctcaggtgcatttttatttttacattagtttgtgtgtgtgcatatccctagaaaactttcaaacttcaaaggctctactattcccagggcaaatggattcctgttttaattgatacgaggaaaactactcctcaaagcttgtgtaatctttgaaaaattctactacatttaatggttatatccaaaccctaatgtattataatatgctactctttttttgagactgagtcttgctctgttgcccaggctggagtgcagtggcgccatctcggctcactgcaagctccacctcccgggttcacgccattctcctgcctcagcctcccgagtagctgggactacaggtgcccatcaccacgcctggctaatttttttgtatttttagtagagctggggtttcaccatgttagccaggatggtctcgatctcctgacctcgcgatccgcccgcctcggcctcccaaagtgctgggattacaggcgtgagccaccgcgcccaatctataatatgctactctttcctgaaaatacccctcagtgtgagatacagtggacagacatgctatgatgcagattctcttaagatttgaaattttacatttcgtatagtttacacttttaaaagtgtataaaggattaaatcttaatgaagacaacttaaaatttaaaaaaaactacattatttaaagactttaatagtaaaatatagtgcagataaatatcttcgttcattttatttttttattttttattttttttgagacggagttttactcttgttgcccaggctggagtgcaatggcacaatcttggctcacagcaacctccacctcccaggttcaagtgattctcctgcctcagcctcccgagtagctgggattacaggcatgtgccaccatgcccagctaatctttttgtatttttagtagagatggggtttctccatgttggtcaggctggtctcgaactcctgacctcaggtgatctgcctgcctcggcctcccaaagtgctgggattacaggcgtgagccaccgtgcccggcctttttaatgtatatttttagacagggtcttgctctgtcacccaggatggagtacagtggcacgatcgatcatagctcactgcagcctcagcctcccctgctcaagtgatcctcccaactcagcctcctgagtagctggaactacaggcacataccaccatgcctggctaatttttgtattttttgtagaggcagggtttcaccaaccggcagggttgcccgggctggtcttgaactcttgagttcaagtgatcctcctagctcggcctcccaaagtgctgggattacaagtgtgagccactgcaccaggcctccattcattttagagagataatacatgtgaaggttaaaaaaaaaaatctatgagacaggaaaatctaacataagactcactgtcaagcatatcctggttcattccaggattcttgctccagccaccccgcccttcgtaaaaacttttggtaattccttgtgcatcctattagtgtttctttattaaaacaagcaattgcaggccaggcgcggtggctcacacctgtattcccagcactttgggaggccgaggcaggcggattacctgaggtctggagttcgagaccagcctgaccaacatggagaacccttgtctctactaaaaatacaaaattagctgagcgtggtggcgggtgcctgtagtcccagctactcaggaggcgggcgcctgtagtcccagctactcgggaggctgaggcaggagaatcactagaacccaggagactgaggttgtggtaagctgagattacgctattgcactccagcctgggcaacaagagtgaaactccgtctcacacaacaacaacaacaaaaacaagcaattgcaaatgcatgtttttcttatccatgtttgctcttgtaatgagtagttggactccaccctttctggtatttgactgttggcagattcagtgtcaacccccctcttctttctaacagctgcccactgtcaatggaatcaccaaactctcaaatattttaaggctttattctgagtcagtatgagtgaccacggcccagaaaacgcagtctcaagaagtcctgagaaagtgcaccagtggcagccaggttacagttatttggtatttttgagacagggtctcactctgtcgcccaggctggagtgcagtggcacaatctcagctcactgcaacctcagcctcccaggttcaagcaattgttgtgcctcagcctcctaagtagctgggattacaggcctgcgtcaccatgcctggctaaattttttgtatttttagtagagatggggttttgccctgttggccaggctggtcttgaactcctggcctcaagtgatctgctggcctcagccttccaaagtgctgggattacaggcacgagccacagcacccagctacagtttggttttatgcattttagaaagacaggagttgcaggcagacataaatcagtacatggaaggtaggcattgatttggcctgaaaaggtagaatatcttgaagcgggggcttacaggttataggtagactcagaggttctttgatttacagttggctaaaggagtaaacatttggagtcattagataagaatgaatgtttgggccgggcgcggtggcttatgcctgtaatcgcagcactatgggaggccgaggcgggtggatcacctgaggtcaggagttcgagaccagcctggccaacatggagaaaccctgtctctactaaaaatataaaattagccaagcgtggtggtggcgcctgtaatcccagctactcgggaagctgaggcaggagaatcacttgaacctgggaggcggaggttgtggtgagatcatgccatcgcactccagcctgggcaataagagcgaaactttgtctcaaaaaaaaaaaaggaatgtttaaggaagacagctgggctcaggagcctataatcccagcactttgggaggctgtggcacacagattgcattaggctggggacagtggcttatgcctgtaatcccaacactctgggagcccaaggcaggtggattacttgaggccaggagttcaagaccatcctggccaacatggtgaaaccctgtctctactaaaaatacaaaaattagctaggtgtggtgtgtgtgcctgtggtcccaactatttgggaggctgaggcagaagaatcccttgagcccgggaggtggaggttgcagtaagctgagattgcgccactgcactccagcctgggtgacagaacgagactccatctaaaaaaaaaagtaaaaatgaggtcgggcgcagcagctcacgcctgtaatcccagcacgttgggaggccgaggagggcggatcatgaggtcaggagatcgagaccatcctggctaacacggtgaaaccccgtctctactaaaaatacaaaaaattagctggacgtggtggcgggcgcctgtagtcccagctacgcaggaggctgaggcaggagaatggcgtaaacctgggaggtggagcttgcagtgagccaagactgcaccactgcactctagcctgggcgacagagtgagactccatctcaaaaaaaaaaaaaaaaaaaaaaagtaaaaacgattagctgggtgtggcagcatatgcctatattccccactacatggatcacttgagcctgggaggtccaagctgtggtgagcagtgattatgtcactgtactccagcctgggtgacaaagcaagagaccctgtctcaaaaaaaaaaaaaaaaagataagaaaatctgttaaccaatacactgggtcggaatgacctagagtttgtgacttaacccttggagagcatggccttaggtcttatttataatttggtatcttattgtcataaagagttttgttagttttatggtctctattttaacattaatgctggtcagttgtgcctaaactccaaaagggaggggttataacagggtgtgtccgacctcccttcccatggctgggaattcagtttttattgtttttgttctttcaagacagggtctcactctgttaaccaggctggagtgcagtggcacagtcatattatagcttattgcagccttgaactcctgggctcaagctatcctcctacctcagcctcctgagtagctgggactacaggtgcatgccaccatgcccagttaatttttactttctttgtggagatggggtctcactgtgttgcccaggctgttctcaaactcctggcctcaagccatcctcagtcccaaaatgctgggattacaggtgtgagccactgcgcctggcctgggaattcagtgtttagggttgttatggggttcccttggccaagaaggggtctgttcagtcaggagggtgctttggattttattttttgtttacaatacctggacaagctgagaaagctgaggcgttccctccttgggccttgctggagagtcccacctaagaagcttttcccctcgaggggaaatgaactctcctactgccccacccccaatcacagtaaacacccagtccaggctcctttccttactctctcaagccattttgcctgcttgaggggcctggcctgcttttctcagagacctcaatcatcttagtaattaaaccttttcataccctctcagcatgtgtgcaccataaccacactggcatcgctgtcaacattggaactgcacctctggggtgaccatggcaactggtgccgtgcacaggatgcctagacttttatcaccttatcagtctgtgttctcttgttggaattactaactcgctctgccaggtggtggctggcatgtggggtgagcgctgctggctggaggagctggtgctctgagtgtgctgctctgtgttgcatggtgagccctgccgggcctgggttctacattccgctgacttgagttggcagtttggatagttccttggcatttgggagcaggagtttgggattgaatccctcctgaaagctctcctgagtgcatgtcttggccaggacctatctgtgtatttagattgaaccaatacttcctttcacaagcaaccacatctacaattctaatcatagctgttattatcaatataatgtactctggacaatgaaaaccacaaaaatactaacccaagcagcattcctaacagttaccatagctcttgtgataaaattaggaatagccccttctacttcgttttttttctttttgacatggaatcttcctctgttgcccaggctggagtgcagtggcatggagcgatcttggctcactgcaacctctgcctccgggttcaagcgattctcctgtctctgcctcccaagtagctgggattacaggagcctgacaccacgtccagctaatttttgtatttttagtagagacagggtttcaccatgttggccaggctggtctggaactcctaacctcaagtgatctgccagcctcagcatcccaaagtgctgggaatacaggcgtgaaccactgcgccctgtgccccgttctatttctgaatcccagaagtaacacaagggatctcattaacatcaggtataaataatcctccttacataacaaaaactagcaccagtctccatcatatttcaagtctacccttaatagacctaaatatgctactggcaattgcagcactatctgtcccgaagagggctgaggccgacttaaccaaacacaactccgaaatatcttggcctactcatcagttgctcctataggctgaataatcacaattttagcctacaacccttctatcacaatcctaaatctatggatttacataaccctaacaattacagtatttatattatttaatctaagtacaagtactataacattatcactacattatatatgaaataagttaccactactacttccacaattcttatcaattttccctactgggactaaccccccttacaggatttatacccaaaggagttatcattcaagaattaacaacaaaatagccttattatacccacacatagagctgtcacagcgctatttaatcaatgtttctacatacgcctaatttactccacatcactagtgatattcccaacaactaataacataaaaataaaatgacaatttgaaaatataaggccaggtgtggtggctcacacctctaatcccaacactttaggacgctgaagcaggaggactgcttgagcccgggagtttgagaccagtctgggcaacagagaccccatctctacaaaaaattaaaaaattagccaagtgtggtggaatggtcctgtagtcccagctactcaggaagccacaccactgcactccagcctgggaaacagagcgagaccctgtcacaaaaaaaaaaaaaaaaaaaaaaaaaagaagaagaaactataaagcaagccctctttttatcaccactcattactgtatggaccctattcctaccactcttactctcaccaatactttctcttttttgttttttttcttttttgagatgaagtcttgctcagttacccaggctggagtgcaggggtgtgacctcggttcactgtaacctctgcctcccagattcaagtgatcttccctcctcagcctctcgagtagctgggattgcaggcatgtgccaccatgcctggctaatttttgtatttttagtagagatggggtttcaccatgttggcagggctaagctcgaactcccgacctcaagtgatctgcccgcctcagcctcccaaagtgctgagattataggcatgagccactatgcctggccctcaccaatactttcaacaataaactagaaatttaggttaaattaggctgggcacagtggctcacgcctgtaatcccaacactttgggaggccaaggcgggcagatcacttgaggtcaggagttcgtgaccagcctggccaacatgacaaaaccccatctctacaaaaaatacaaaaattagccaggcatggtggcacacacctacagtcccagctactcaggaggctgaggcgggaggatcagatctacatctaccaccataattattgccatccctgcagatagtaaggtctttagttgactaacaacagtacctggaggcaatattaaatgatccgctgccatactctgagcactaggcttcattttccaattcacagtgggaggtttaactggaatcatactatcgctagatatcattccacatgatacatattatgttgtaatacatttccattatgtcctgtcagtaggatctactgctatagatgcccaagaagtagaggcagtatgaactattctacctattatctttattttaattgctcttccatcgttatatattctgtatacaacatgaaattaataacccctccctaaccatagaaactatagatgatactggccaggcgcggtggctcatgcctgtaatcccagcactttgggaggccgaggtgtgcggatcacctgaggtcgggagttcgagaccagcctggccaacgtggtgaaaccccatctctattaaaaatacaaaaaattagccgggcgtagtggcagggcctgtaattctagctacttgggaggctgaggcaggagaatcgcttgaacccaggaggcggaagttgcagtgagccgagattgttccattgcactctagcctgggcgacagagtaagagtctgtcccaacaacaacaacaacaacaaaaaggccgggcgtggtggctcacgcctgtaatcccagcactttgggaggccgaggcgggtggatcatgagatcaggagatcgagaccatcctggctaacacagtgaaaccccgtctctactaaatatacaaaaaattagcgaggcgtggtggtgggtgcctgtagtcccagctactcgggaggctgaggcaggagaatggcgtgaacctgggaggcggagcttgcagtgagccgagatcgtgccactgcattccagccttggcaacagagtgagactctgtcttgaaaaaatatatgtatatatatagatgatactgaagctatgaatatacaaagtatgaagacctaaattttgactcctacagatttcctacaacagacttaaaaccaggagagctgcagctacttgaatttgacaatcaagtagccttccccgtagaaacatcaattcaaatattaagttcgtcgaaagacatcctacgttcatgaaccttaccatcattaggcctaaacagatgcaatgccaggatgtttaaaccaagcaatcctgacatttacacaatcaggcctttctacagtcagtgctcggaaatctgtggatctaatcatagcttcatacccattgttcttgaacttgtttagtacccctaaaacacttcgaaactggtcagcatctatattataatatcactgtagagctaatcagtactaaccttttaagttaaagactgagttatgatctttccacaacgaagtgccccaactagacacatccacacgatttattactatcatatccataatcctatcaccatttcaattaaaaatttcaaaattcatctacccaacaaactcaacactaaaagcttttgaaatatagaaacatgaaaccccttaagaaataaaatgaacatctctttcattaccccaacaatagtagaactgcctgtagttattctttttttctttttttttgaggctgagtcttgctcttgttgcccaggctggagtgcaatgtcgtgatctcaacttactgcaacctctgcccttcgggtgcctcagcctcccgagtaactgggattacaggcacccaccactacactcggctaattttttgtatcttttagtaaagacgggatttcaccatgttggccaggctggactagaactcctgacttcaggtgatccacctgccttggcctcccaaagtgctgggattacaggcatgagtcaccacgcccagacttcctgtagttattctaattatcctgtttccaaatatttccatcacctagccatctgattaacaactggctaatttctgcccagacgcgttggctcacgcctgtaatcccagcactttgggaggccgaggcaggtggatcatgaggtcaggagttcaagaccagcctggccaagatggtgaaaccccatctctactaaaaatacaaaaattacagcgtgcctgtaatcccagctactcgggaggctgaggcaggagaatcgcttgaacctggggggtggaggttgcaatgagccgagatcgcgccactgcactccagcctgggtgacagagcgagactccatctcaaaaaaaaaaaaaaaagaaaaaaaagaaaaaaaaaaaaactggctaatttctatacaatagtgactattaataattcaacttatactaaaataaattatgataatacataatatcaaaggacaaatctgatccccttgtttttttgttgttgtttttgtttttgtttttttgagatggagtcttgctctgtcgctcaggctggagtgcagtggcatgatctcggctcatcgcaacctctgcctccagggttcaagaggttctcctgcttcagcctcctgagtacctgggattacaggtttgcaccaccacacctggctaatttttatatttttagtaaagacagggtttcaccatgttggtcaggctggtctcaaactcctgaccttgtgatccgcccgcctcagcctcccaaagtgctgggattacaggtgtgagccactgcgcccggcccccacccccggtttttgtttttttttttgagacagagtcttgctctgtcacccaggctggagtgcagttgcatcaccatggctcactgcagcctcaacctcaaggcatctgcccacctcagcctcccagagtgctgggattacaggtgtgagccaccatgcccagccgaacctgctcccttatactaatttcactgatcttcttgtttcaacaaatttactagggctcttacctcactcattcacaccaactactcaactgtcaataaacttaggtatggctattccactatgagcaggagcagtaattactggcttgcaccacaaaacaaaagcatccctagcccattttctaccacagaaaacacctattttacttattgccgtactactaattatagaaaccaccagcctcttcattcaaccaatagccttagctgtgtgactaacagccagtattacagctggccctctgcttgttcatttaattggaggcgccacacagtattaacatcaatcaacctacccacagcctcagtcagatttacatcttgattatattaaccatttttgaattcgtcatagctttaatccaagcatatgtttttacactactagtgagcctctatctacaagacaatacttaatgacccagcaaacccatgcgtaccatctagtaaatcctagcccttggccattaacaggggctctcttagcactaataacatccactacccagacttagtggttggatggcaagcatgtggtctttggcaaggtgaaagaaggcatgaatattgtggaggccgtggagtgttttgggtccaagaatggcaagaccagcaaaaagatcaccattgctcactgtggacaactctaataagtttggcttgtgttttatcttaaccacccaccagaccattccttctgtagctcaggaaagaacccctccactccatttgcttgcagtatcctagaatctttgtgctcttgctacagttccctttaggttccatgttttccttattcccttccatgcctagctggattgcagagttaaatttatgattatgaaataaaaactaaataacaaaaaaaggtaaagaaagaatacgataaacatggaaacaaattaaacataaaaaatgcctgaaaaccatttcatggaagataaaagaccacataggaaaaatgttcaacagcaatggtaaccagtaaaaagcaacatataattacacagagactgtgtttaacactcaaggagcacaaataaataagttagataattccaagcattggcaaattgcaaggaataaacacacatgcatgagtggtcaaatggttaattgatatactccatcagtatttcctactaaatatgaatttatccataatatacaactcagtaattttttcccaatatgtaaaaaatttataatttagcacttggagacataaataagaatgacattgtcaccaggatcaaaaaataaacttgaaacaacattagtccacaagcaatagaatgaagcctcagacagtaatgtatgtgcaacagactgaggcaaaaaaaccacaaaaaaaaactttcagcataacattaattgtaatagtaatactaacttgctgaaaactcaaaatagccaaaactctactttatggtaaatagatggtaaatctataaagaataacaacaacaacaaatcaccatcatggtcacctctgggtgcagaagggaggtgagatcagggtgacataccagtgctgccaacagcctatttagctgggtggtgagtccgtgggtgtttatgttataatttctttttttttttttttgagacggagtctcgctctgtcacccaggctggagtgcagtggtgcgatctcggctcactgcaacctctgcctcccaggttcaagcgattctcatgtctcagactcccgagtagctgggattacaggcgcccaccaccacgcccagctaattttctgtatttttagtaaagacggggtttctctatgttggccaggctggtctcaaactcctgacctcgtgatccaccagcctcagcctcccaaagtgctgggattacaggcgtgagccactgcacctggcctatattattatttaaactaagcataagtattttatttccagaattctctttgcttcttcagaccttatgactcaatccaaccagattgtcaaccaagacaataaaactcttacactcaaatcatggaataaaattcttgaatgcttcagcaaactataattatatggcagcaatattctgtaaagaaaatgagtgtgaagctgctctgcccgagtggctcagaactccaagagatatacctgattggggcaaggcccccaaaaagactttagctcaaagatcaatctcttgcttactccctacaaggagtgtgcacattccttacagcttccaccttttttcttttttttttttttttgagacggagtctcgctctgttgcccaggctggagtgcagtggcacgatctcggctcactgcaagctccacctcccaggttcacaccattctcctacctcagcctccctagtagctgcgaccacaggcgcccgccaccacacctggctaattttttgtatttttagtagagacggggtttcaccgtgttagccaggatggtctcgatctcctgacctctgacctcatgatccacccgcctcagcctcccaaagtgctgggattacaggcgtgagccaccacgcccggcctttttttttttttttttttttttagacagagttttgctattgttgcccaggctggattgcaatggtgcaatcttggctcacagcaacctccatccgcctcccaggttcaagcgattctcctgcctcagcctccccagtagctgggactacaggtgcctgccaccatgtcctgctaattttttgtatttttagtagagatggggtttcatcatgttggccaggttagtctcaaactcctgacctcaggtgatccacctgcctcggcctcccaaagtgctgggattacacgcatgagccaccacgcccggccgcaaataaactcttaaattcataaaccttttctttagcagacagaacccaaaggtgtctgactcttacagatgttctcattttgcacaaattacactctgactaaatcaactctgcggatggaaaaccaaactgctgaccatgttgaattttaccttagttctgtaggtaacggaaaccccaccactaccaccatcttctgtgatctagagaagcaggctactacaaaataacacccttcccattacaacttagatgatgtccctgtctacctatgtataaggccagacacacactctccaaattcccattctttgcctcatgaacaattagctgaacagttttatcttcactgatcagttgaaacaaaataccagtgaacccacactttggttaagtttctttctttcttccaggcccctgaacttccacccaccttcagtagcctgagcaagcacccaaccccacctttatgacccctcctaagaacaggctgaccttaggatcaaatattctctaatctagcatctgattttgctcccctccatcctgccctctctctctctcactttattactaatctagcttgctcctccctatgaaagaaaactttacctaacctttgagatgctttcaaatattatacttggtgctttcctcctatcactacaatacttcattcaaataaggtcactacttacctaaatctggattttacttgagggtgtctagaaacagccccagggcaataacaactacaaccacagaaggggcaacagatcccacccccaaccgcatctgcctatggatcccctaggaaacctgcagcatagtctcgccaggaagaactaaatgggccttcggtgacctccccttacaggctcaagattggccttagcttggagtcactggcctaaggcctctgctctccactgaagggtactcattttttttctctattcgacaagcttttattggggtatctactatgtgccaggtaccagtctaagtattggggaacaaagactaataagctcccagccaggtgcagtggctcacgcctgtaatcccagcactttgagaggccgaggcggatggggagttccagaccagcctgaccaacatgaaggaaactccatctctaccagagtcaaaaaattctggtatcaaatcctggatttgccacttattagctctgggactgtgagctaatgattaattctttctttctttttttttttttttgagatggagtttcactcttgttgcccaggctggaatgcaatggcgcgttcttggctcactgcaacctccactgcctgggttcaagcgattctcctgcctcagcctcccaagtagctgggattacaggcatgcgccaccggacacctggctaattttttatttttagtagagatgggggtttctccatgttggtcaggctggtctcaaactcccgacttcaggtgatcctcccgcctcggcctcccaaagtgctgggattacaggcgtgagccaccgcggctggctgaacaaacctcttcaaggtgacgaacccagggagaggtagtgctgacttagaacacagaaatgtctgactcaagtgtcaggtcaggtcatcctgtcacatgggacaccccctcaccctcaatgaagtgctcaatgatcaccatcccaagataagacaatgcattgtacacccccgtgtacccaaaatggcatttcgcttttcagttttcttgcactgccatgactgcgtgggttttttcttgtccttcggtatagtttttctcccttctgtagtctgagagaatccagaaggcaagaatcaatacccctcaataccagcatctgattgggtgacccccagtatccccaaaggaatggaaactggggttggcgaagaaaagctgagtgccccaggggttggctatttatttgagggggataccaggagactctttccagccgagggtatccagctgctcccctgagaggccccaaacctatctctgagaagataaccgaggagctcataattcactagatcctgcaagagacttggcagctgagggcatcttgggtctgccccaggcagttctgaaatctaagaccagggaaggatagagggtgggctaaggacacatcacggcgtaaagtttccaaaaaggaacctcaacccaaagacattctgataaggtgtctgtgcctagggaagatgaaaggagaggcacaaagtatttttacggtagagcgccaggtgcttactctctgctttcctctcagaggaaaagtccacaaagagaaaacaaatctcttaaaaaaagccatccattgctttgtagggaaaaatgaataaacaattctaatactatgtttgttggaaatgtagaatgaaggacaaaaagctgataaagttggctgggtgtggtggctcacgcctgtaatcccagcactttgtgaggccgaggtgggcagatcatgaggtgaagagatggacaccaacccggccaacatgatgaaaccgagtctctactaaaaatacaaaaaattagctgggcgtggtggtgcgcgcctgtaattccagcttcttgggaagctgaggcaggagaatcgcttgaacccaggaggcggaggttgcagtgagctgagattgcaccactgcactccagcctggtgacagagcgagactccgtctcaaaaaaaaaaaaaaaaagccatccacatccattgctttgtaaccaacaagcaattctaatactgtgtttgttggaaatgtagaatgacggacaaaaacctgataaagttgtgaactggaggaaagctggcctttggaaatgcagggaggaatttattcccagcccctgtatgagggccgaggtcgtgtctttgggaccctgcttcccatacatttagaagacctgtagagaaaccagtatccccgggaaagatgagggactgaggatcccacagaccacagctcctcccacactaaccccacaaccgaggcgggattccccccatgaccctcccgtgaccccgcacaatctggagaaacgcggggctgcggtcgccacggacggacgcgataggacgcccggggtcccggctgccggcccagacccaccccgcggcagaggggaccgagggacgagctgcgccaggaggactcaagtcccagatcccgaagtcgccgcggggaggcccgggtccctccacagctggatcctgctggattccaaccagcccctcctccaagtctagggactccaagccccgcacacgcaccgtatcccgggttccaggtgtcctggcttccttactacgcctcctttggtcagagctggtcacagcagacagggactgcagcggcgccacctgtggcgtcctctgcagaaaggacctgccccgctgacctgttgaccgttgcccaggcatcctggcggcacaccccattggactgttcagagctcgccccagcgcccccgattgggtagattcgggctccaccccctgcgtcacagaagtcatctaataggtggctgcagggataggctgtaaccgcagccaatagcaggcccagcttcctccaggcaaccaaatcaggctccgctggaggcatcaacacaattgtccacaggctttccagagctactactactggcctcttcctgtactcggtgggccctttctccctcttccaggtcacagatgagcagaaggaattccagactcagtgtccaatggagacatctccttccctcaaagcaaaaggaagccgagtccaaaccaggccacactggaacagcagggagggcctgatgtcctccagagatcaggaatttgggatggggcagttggtgccatggccaagccattttctcaccttatctcttagtctactcattttcagcccagaaaaaaaaacaacaacaacaaaaaccatgccaacgtgggaataaaattaataaaggcatggaaaaattattaaatgcatagttatatggcagcattattccataaaggaatcaaaaggaaagcaaacatttgaactagctcaggcaagcaggcttcacccacagttcacaaggaacacctgcattcaggtttaacatattcttaatcttgggagtcagactcttgactactgaaatggatgcccaggtcgatcagaccctcctgatgaggtagggaaacctaaggatttaactctgggagctcaacatgcccttatgtaccctccacacagtgtggaaaagctgcctccttcaagaccttcatttacacctgcaggagactcttacctggagtcagtttaacattctaacctacataaactatcagctacataaatcctttctccaaaatgagtctttatctgagcctgaccatgccagatttacttcacatatacaaattacagttggaccacaatgaccctatgtatgccaaaacaaacacattgcccagaaaatagttagcctgagaaaggacagaacaccccaagcatgtcttcacatgaatcttttgctttccagggctctgcttctcagaatctgcactcctgtagctgttctgagcaaccagaggccacctacggagacaacaggctgcccagaaagccacatgaggagctccatttccctccctttgcaggctccagactggcctcaggttggagtcactggctgcaggcgctgctgcccactgcaggttcttcacctgcttctcaccagcactgatcagctacatgagacaaagactctctatcgtactgtatgagaaagaaaccagcaaagtcctacgtttcctcctgtgtttacatacaaatcagaggaagaaaatcttaaaatattttatatggattaaaacactggagtgggcgtaagtaatggcttgtgcctgtaatcccagcactttgggaggctgcagtgggaggatcgcttgagcccaggaattcaagaccagcttgggcagcatagattttcacctctagaaaaaaatttaaaaacttagcagtgcatggtgatgcgcatccatggtcccagctactcaggaggctgaggcaggaggatcacttgagcctaagaggtcagcactgcagcgagccaagattgtgccactgcactccagcctgggcaacagagttagactctgtctctaaaaagatttaaataaatatattttaaaattggcaaataagcattccttttagaaaacaaagatgctagcgaactattattttcacattaacacttatgaaaagaactaatcaaatgtgagctcttcccttttttctctgtttcagtggccacctgaccttcacagtacatggttgtcaccaggtgctctgtggctggggatgttcatgtccagtttatccatctgaatctctctcaaccccaccccaccaccattgacccacccaattatttctgtagctaaacattaagcattgtataaataactgtccctttcaaagaggactcaggttgaatacacctgtgattctctcagatcctctgatataatcatttgcatttgtcttccaggatagactgtgatatcttgagtaggaacctcattcattgtatttgcttctgttcccccaaacctgtgtcaccacctgatcattgaggacacagaaaatttattttatttatttttttgagatggagtctcacttttttttttgagatggagtcacccaggctggagtgcagtggcatgatctcagctcactgcaacctccacctcccacgtcaagcgattctcctggtcagcctccagagtagctgagattacaggcatgcctcaccaaaccttgctaatttttttgcatttttagtagagacagggtttcaccatgttggccaggctggtctcgaactcctgacctcaaatgatccacccgcctcagcctcccaatgtgctgggattacaggcatgaaccaccgcgcccagccaacacagaatattttaagctgaccatcaacctgctgtaaacattggagatctcagcacaaccctaaaacatccacaccccagggagagtatacagatattaacgtgccctcactacaaggagctccactgactccctttctggaaaatgactcaaatcggttttctggaggactatatgcaattaatagatataaaaataacatgttgtttgcttttatttacatgatttaccatttctgtttgtttttgagacagggtcttagtctgtcacccatgctggggtgcggtggcttaatcttggctcactgcaacctccacctcctgggctcaagcaatcctcccaccccaaccccttgagtagctgggactacaggtgtgcaccaacatgtttggctaatatttaaatttttggtagagatgaggtcccactatattgcccaggctggtctcaaactcctgaaatcaagcagttcttctgattcagcctccctaagtgctgggattacaggcgtgagccactgtgcctggctgatttaactttcataggttgttaagaaagcgattaaccctgtgaaccatggttggatttcactgattctcaaaacttgtagtgaattcttataattttatgttgccttgacatccattttaaatacaagtttaactttctcataggagaagcagggtttattcactgttaacactgtttccagttctccacctcctcccagttccttaatgtagtgaatccatatatctgccttagacaactgatacccagtgaccacctcgttataggacagccagatataacgttcatactggcctcactgacccccacgcttcatatgaactgtgtaggtgtgctacagtaaccacctctcagtcacactgtgatctccttgaacttgtgcctgcttgctttaaacccatcaattaaaattccctaggggaaacttttgtgtcttttttggtttgtttgtttttgagtcggcgtctcgctctgtcgcccagactggagtgcagtggcatgctctcggctcactgcaacctccacctcccagcttcaagcaattctcctgcctcagcctcccaagtctctgggactataagcacgtaccaccacgcccggccaattttttctatttttaacagagttggggtttcaccgtgttagccaggatggtcttgatctcctgacctcgtgatccaccggccttcgcctcccaaagtgctgggattacatacgtgaggcacctcgcccggctgtatccctaggggaaactttcggtaacaccctggactctaataaaggtactgacccatgggttcatccatttctccctttctctccatgtggtccctctgtgtgtgtggcctccgtgtatactgtgtatcctccaggacctgtaagtaataaaatccttatttccatcttatgtctctcgtaatcattgaaagggtgctctccattttaaagatcctaaattattacaattggtatagttggcaggatacagagtgattctcatgattagcacaagttatctttgagttgctatagcttattaacatcataaatcatctgggcaaccacactggtgaggtagtagtatttgctgtaataaatgaaatagagatgaaaaaacaacacaaggccaggcgtggtggctcacgcctgtaatcccagcactttgggaggccaaggcaggcggatcatgaggtcaggagatcgagaccatcttgactaacacgttgaaatcccgtctgtactaaaaatacataaaaaaaaaattagccaggcatagtggcaggtgcctgtagtcccagctactccggaggctgaggcaggagagtcacttcaacctgggaggcagaggttacagtgagccgagatcgcgccactgcactcccgcctgggtgacaaagcaagactctgtctcaaaaaaaaaaaaaaaaaagaaagaaagatcaacaaaatgaagagtttttttaaaaaggtaaaatcagcaaagctctagcctgactcactagataaaaatagcagattcaaataaagaaattcagatgtgaaaaaaaaggagttggccgggcatggtggctcacacctataatcccagcactttgggaggccaggcgggtggatcacctgaggtcaggagttcgagaccagcctggccaacatggtgaaccccgtctctactaaaaatacaaaaattagctgggcttggtggcgggcacctgtaatcccagctactcgggagtctgaggcaggagaatcgcttcaactggggaggcagaggtgacagtgagctgagatcgtgccattgcactccagcctgggagacaagagcgagacttcatctcaaaaaaaaaaaaaagaaaagaaaagaaaaagaaaaaaaaggagttggctgggtgtggtggctcacgcctatgatcccagcactttggaaggctgaggaaggaggatcacttgaggtcaggagttcaagacaagcctggccaacatggtaaaaccccgtctctactaaaaatacaaaaaattagctgggcatggtggcgcatgcctgtaatcccagctactcaggaagctgagacaggagaatcacttgaacacgggacggggaggttgcagtgagcggagatcgcaccactgcactccagcctggacgacagaacaagactgtctcaaaacaacaacaaaacaacaaaaaaaacagggtcattccaacttatactaaagaaatagaaagaattataaaacagactattatgaacaactacacaccaatgaattggaaaacctagaagaaatagataaattcctgggcacgtacaacctatcaaaattgcgtcgtgaagaaatagaaaatctgaacagactaataagaagtaatgaggttaaatcagtaataaaaagtgtcccatcaaagaaaagcccaggacctgatggcttcactgctgaattctaccaaacaaacacaactaaaaagtacaggccaacatccctgattaacatagatgtaaaaatcctcaacaaaatacatgcaaactgaattcaacagcacattgaacagaccattcaccctgaccaagtaggatgtatcccatgggtgtagggatagttcaacatatggaaaccaataaacgtgatacatcacagtaacagaatcaacaagaaaaaaatatcatttcaatatatgcagaaaatgacttgataacattccatatattcatgataaaaactcacaacagggccgggcgcagtggcttatgcctgtaaacccagcactgtgggaagccgaggcgggatcatgaggtcaagagatcgagaccatcctggccagcatggtgaaaccccatctctactaaaaatacaaaaaattagctgggcgtggtggcacatgcctgtagtcccagcaactcgggaggctgaggcaggaggatcacttgaacccaggaagcagaggatgcagtgaattgagatcgtgccactgcactccagcctggcgacagagtgagactccgtctcaaacaaaacaaagcaaaacaaaacaaaaaaaactcacaacaaattaggtatagaaggaacatatctcaacacaatgaaagctttatatgacaaacctacggcaaacatcatactgaacaggaaaaaaatggaatgctttttctctaagatctggaataagataagcactcccaccacttctagtcaatgttgtattggaagccctcatcagaattattagacaaaaaagaacaacaaaggaagggagggaaggaaggagaaaagccaaccaaattggaaaagaagaagtaaaattacatttttgcggacaagattgtatatatagaaaaccttgccgggcacggtggctcacgcctgtaatcccagcagtttgggaggctgaggcgggtgaatcacaaggtcaggggttcaagaccagcctgaccaacatggtgaaacccccgtctctactaaaaatacaaaaattagctgggcgtggtggcagacgcctgtaatcccagctactcaggaggctgaggcgggagaattgcttgaacctgacaggcggaggctgcagtgagccaagatcgtgccactgcactccagcctggcaacagagcgagactctgtctcaaaaaaaaaaaagaaaaagaaaaaagaaaaccctaaagacaccaccaaaaaattgttagaactaaaacaaatgcagcaaagttgaaggatatgaaaatcaacatataaaaatcagtagtggccccagcctggccaatatggtgaaaccccatctctactaaaaatatataaaaaaaaaaaaaattagccaggcatggtggcagatgcctgtagtcccagctactcgggaggctgaggcaggagaatcgcttgaacttgggaggcagaggttgcagtgagccgagatcgtgccactgcactctagcctgggcaagagagcgagactctgtctcaaaaaaaaaaaaaaaaaaaaaaattcagtagtgtttctatatgccaacagcaaactattagaaaaaggcatcaagaaaccaattccatagatgatagctacaaaaataaaatatttaggaataaatataaccaaagaggtgaaagagctctacaataaaaactataaaatgccggtgaaataaattgaagaggacacaaataaataggaggatattctgtgttcatggactgaaagaattaatatttttcttttcttttttttttttttgttttgagacagagtctcactctgtcaccccaggttggagtgcagtgctgtgatcacagcttactgcagccttgatgttccgggctcaagtaaccttcctgcctcagctgggactacaggcacacaccaccacgcccagctaattttttaaaaatttgttgtagagacgaggtctcactgtttcctgggctagtctcaaactactgggctcaagtgatccttctgcctctgcctgccaaagtgctgggaatacagatgtgagccaccatgcccagcttagaatattcttcaaatgtccataccacccaaagcaatttgcagattcaagtgtgatccctatcaaaatacaagagccatacttcacagaaatcgaaaaaattatcctaaaattcatatggaaccacaaaaatagccaaagcaatcttgagtatgacttcacaatagactacaaatctaaagtaaccaaaaaagcaccgtactggcataaacatagacagaccagtggaacagaatagagaaaccagaaataaattcacacacttaccaacgatttttgacaaaggtgccaaaaacacagactggagaaaggacagtctcttcaatgaatggtgatgggaaaactggattatcaacatgcagaacattgaaactggacccctatctttcaccatatacaaaaatccactcaaaatggattacggacttacatgtaagacttgaaactgtaaaactactaaaggaaaacagtaaaattctacatgaccttgtctgtgcaaggactttgtggataagaactcaaacacacgggcagcaaaagcaaaaacagacatgagattacatcaaacatctcaatcccagcattatctcactcattccacctctgggagttactctggggcagtctctggctggattcatctttctctgtgctctgcacagacctagtaccaaggggactagaagcagcatttacttgttcactaaaaaaggggtatctgcaggaaggtgctgcagttcaggctgtggccacgctggggcatcagtagacaggtaaaatgtagtaagataacccacagaaggtgcatcgtgacgtgcttgacagtaattctgtctgaagcgttttgttttgctttgttttgtttgagacagggtctcactctgtcacacagattgaagtgcggtggcatgatctcagctcactgcaatctccgcttcccaggttcaggcgattctcctgtctcagcctcccgagtagctggaattacaggcgtgtaccaccacacccggctgatttttatatttttaataagagacggggtttcaccacgtaggccaggctggtcttgaactcctgacctcaagctatctgcacacctcggcctcccaaagtactgggattacaggcgtgagccactgtgcctgggcataaagtgtttccattagcagtactcatgttgcggtattattgtcatcatcatcattttcataaagtagaaagtaaaacttctctcaatggtacccataatttacactgaagatgtaactattccttgagaacaagatagaacctggcctgggaaacagcactaatgcttgtaaattagttctgtgacaactattctgatttcttctatggttgcttattcttccataccatgtaagtaaattccgtgattattagttttgggtgattcatgctttccccactagaaagaacaatttggtttattacgctatcttccacccgtttctccaacaccagtcactatttcagtcagagcatgaagaaaaataattttggaaatggaaacctgatgttctgccatttaaaggtacttcatgaaatccactccaagagggatcacttgcttcatttccttgcagagttgttttttgtttttttttttttttttgcgatggggtcccactctgtcgcccaggctagagtgcagtggtgcaatcttggctcactgcaacctccgcctgctgggttcaagcaattctcctgcctcagcctcctgagtagctgggattacaggcgtcagccaccatgcatggctaatttttcgtatttttagtagagttggggtttcaccatgatggccaggctggtctcaaactcctgacctcgtgatccatccgccttaccctcccaaagtgctggattacagacatgagccactgtgcctggcccatttatttctttattgtgcaagcagtgacttatttatccactgcttttttttttttttttttttgagatggagtctggctctgtcacctaggctggagtgcagtggcgtgatctcagctcactgtaacctctgcctcccaggttcaagcaattatcttgcctcagcctcccaagtagctgggattacaggtgtgcaccaccacacccagctaatttttctgtttttagtggaaatagggtttcgctgtgttggcgaggctggtctcgaactcctggccttaagtgatctgcctgcctcggactcccaaagtgctgggattacagacataagccaccacaccaggcctggctctccatttcttgaacaccacctttaccccaggtacagaattagtggtaaatagttacacattacctattacataaactttccatacctaagaagttctctcccaccttttctggacactatatgctgctatttcttctcatattcttaaagatttccgagcaaagaatttctatttgcttaaattatcagatatatatttgatatacatgtctgtgaatagtgtgcagaggaaattaaaagtatccctcttcaataaagggaagtggttatcataggccctgggtctgggagtgaggtccaggtctacagtgaaggggggaggagacagggaagtcaatcctggggatcaaatctaaatgcctactaaaatccaaatggactgtgtaggaacaggtccctcatggatagaaaaacgaaaaaaacagtgctgagaacaagtaggaaagagacctagagactaggcgcagtggctcacgcctgtaaccccagcactatcggaggccgaggcggacagatcacttgagatcaggagttcaagaccagcctggccaacatggcgaaatcccgtttctactaaaaatacaaaaattagctgggtgtggtggtgcgcacctgtaatcccagctactcaagaggctgaagcatgagaagcctttgaatctgggaggcagagggtgcagtgagccaagatctcaccactgcactccagcttgggcgacagagcaagaccctatctcaaaaaaaaaaaagagagacctagagtgtcttggtatgctgaaggtcccacaaggtctatgcagtactgtggtcttttctcccttttttgtgtgtaaaacatacataaaattcaccatcataatcaattttaagtgtacagttcagtgccattaagaacattcatactagtgtgcaaccatcaccaccatccacctctggaaccctttttatcttgcaaaattgaaactctatgcccatgaaataactatccattacccaatttccctaacctttggcaaatggtattgtactttttctatcaatatgactactctagatacctgatataagtagaatcataccgtattgtctttacatgaatggcccatttcacttagcacgtcaaggttcatcttgcagcatatttgtaaatttccttactttgtaagactcagtaatattctcttgtatgtataaacttccttttgtttattcatctgttgatgaaaacctgagtagtttccagagtttacctattgtgaatgatgctatgtacacaggtgtacaaaacctatttgagactttgctttcaatcttttttgttttgttttgttttttgagacggagtcttgctctctcacccaggctggagtgcagtggcgcgacctcagctcactgcaagctctgcctcccgggttcatgccattctcctgcctcagcctcccgagcagttgggactacaggcgcctgccaccacgcccggctaatttttttttagtagagacggggtttcatcatgttagccaggatggtctcaatctcctgaccttgtgatccgcctgcttcggcctcccaaagtgctgggattacaagcgtgatccaccacgcccggccctgctttcaatctttttattttcccagaaatggaaatgctgatcatatgttatttctatattttaatctggggatctgccatactgttttcagcaggcttataccactgtacattcccagtgatagtgcacaatgttctccaacattccacatccttgacagtatttcttgttttccatctttgatactactaatcctaatgagatgctatgtatgtcttgagtttgatttgtatttccctaatgactaaagatgtcgagcattgttacgtgcttattggccatctgggtatcttctttggagaaatgtctattcaagtcctttcctccattttaaaattggattgtgtcttagcttgggttgctaaaacaaaataccataaattggaaagcttaattaatcaacaaacatttatttctcatggtttgggaggctgggaagtccaatatcaaggcactggcatagtccatgtctggtaagggcctgcttcccggttcaaagatagctatcttctcactgcaccctctcatggtgaagggcaaagctagctctctagggattcctatcaggaaactaatcccaattacaaggcctccatcttcatgatgtcctccaatcctaaaaaccaccagagacagggcctccaaataccatcacattgtgggggagagggggggcacgggggtaaggtttcaacatatgaatctgaggtggcatacactcagccaaaacattacacctctggcccccaaaatccatgtcatcacatgtaaaatatattcatctcatcccaaaggcctcaaaagtctcagttaattccagcatgaagcctaatgtttaaactcaaactccaaagtgtcatctcaatatcacatcactcagatatggatgagactcaattcatgctgaggcaaaattcttcttcagctccgaaccggtgaaaaccaaactagtcatgtatttccaaaatatgagacaggcacaggatagagattcctattccaaaagtgagaaacaggagaaaggggtgagctcccaaacaagtctgaaacccagaaagcaaactgaagactttccatattctttagatatgtagatacttgtagacctgtcctccactattcattttcacaggtattcgaaggttgtgtgataaatgaaagctttcccacattctttacgtaaggtttatctccattatgagctctttcatgtctttgaaaggaactggaataactgaacgtttttccacattgcttacattcatagggtttttctccggtatgagttctttcatgtattctaatggaactggcataattgaatgctttcccacattctttacattcatagggtttttctccagtatgagttctttcatgtgttcggacagaactaggacagtcaaaggctttaccacatacctgacatttataaggtccatctccagtgtgcagtatcatatgttttctaatccttttaagagaaatgaaggctttcccacatacctgacattcatagggtttctctccagtgtgagttctttcgtgtatttgaaatgaactgggacagtcaaaggctctaccacatacctgacatttataaggtccatctccagtgtgctttatcatgtgtcttcggacacttgggagagaaatgaaggctttcccgcattccttacattcatagggcttctctccagtgtgagtcctttcatgtgttcgaacattactggaagaactgaaggttttaccacatttattacattcatagggtttctccccagtatgagttctttcatgctttcgaacataactgggaaaaataaaggctctcccacatactttacatttataaggtccatccccagtgtgcctaatcatatgactttgaaaatttgtgaaagaaatgaaggccttcccacactgtttacattcatggggtttctctccagtatgagttctttcatgtattcgaaataaactggggcggtcaaaggcttttccacattcctgacatttataaggtccatctccagtgtgcctaatcatgtgtctttgaaaacttggaagagaaatgaaagcttttgcacattcctgacattcatagggtttctctccagtgtgagttctttcatgtatctgaaataaacttgggcgatcaaaggctttcccacattcctgacatttatatggtccatctccagtgtgcttaatcatgtgtcttcgaacacttgggagagaaatgaaggctttcccacattccggacatgcatagggtttctcaccagtgtgagttctttcatgtcttcgaaaggattgacaagaactgaaggctttcccacactgcttacatttatatggtttctctccatattcctgatagtcatatggtttgtgtccaaggtgagatctgatgtgcctactaagggatgaatgatgcatgaagactttcccacacaaactacattcacatggtcttactatagtaggaattttcttgttcagattaagattgagaatctgactgaaggcttctccacattgatcatattctttactttcactgagtccctcttccatatgatttctggaaaaaatagaaagcaagatttagtggtttgtgactttatatttattaataggtattcgacttacatttttaccataatcgcggaaagggtaagttttcaggcctgtatgaattgtttgaaagtgaatggatggaatgctctgcaagagagcttgacagtagctatcaccaaaaaagtgatatccatatatacagtttcttaatactatttccaagtgaatgattttgcaacactgaacatctatgccactttttctttttctggtgaaaaagttgtaggaataaataaatctgaagctgggcttactggtttgtttacttatttttaaaatttcatgacatactaagaaggagacattgctttatcttgtcagtgcaaattaccttaaaattctcccctgatttttgtaccaatcttcaatgctctggtcttcccatttttttcctaaaatatagtcagaaaaaatccttatgaactgatagacattacagaaaaatgactagattctaagttcatgataaggtgcaaacaaccctgatttattcacccaagtattcccttttccacattagacatcatgaaaaagcattaaaaagcaagaaatacttcttctctaactgactaaaagaaggaatgatgtcatccttacctacacaggccaggtttctaaaggtttcccgcatcacatctctgtagagtttcttctgggaaggatccagcaaagcccactcctcaagtgtgaagttcacagccacatcctcagaggccactgagtcctaaaacatcccaaatatgcaatgcaggaggaagaatgagatgacagtacagggatgtaaacccaattcataaaagttcacaaatggctaggtgtggtggctcatgcctgtaatcccagcactttgggaggccaaggcatacagatcacctgaggtcaggaacttgaggccagcccggtcaacatggtgaaaccccatctctactacagatatatgaattagctgggcgtggtggcgtatgcctgttaatcccggctactcaggaggctgaggcaggggaatcgcttaaacaagggaggcagaggttacggtgaaccaagatcacgccactgcacttcagcctggctgacagagagagaccccatctcaaacaaacaaacaaaaaacaaaacaaaaaagtcgacaaaacgatgtggcagtctccaaacatttattttatgataaataaatatggttgtcagaattccgtctacattcactttctcataaatttaattaccccatgaaaacatgcaactgatctctacatttttactgtagtcactacaagttttattggtctctaatggcaggatccagttcaccttggagaaacaaataaaatgctatacaaagaaaacaaattttggccaggcctggtggctcacacctgtaatcccagcactttgggaggctgaggcaagaggatcacaaggtcaggagtttgagaccagcctgaccaacacagtgaaaccccgtctctaccaaaaatacaaaaaaattagccgggcatggtggcatgcacctgtaatcccagctactcggggggctgaagcaggagaatagcttgaacccaggaagcggaggttgcagtgagctgagatcatgccattgcactccagcctggaggacagagagagactaagtctcaaaaaaaaaaaatttaagatcatcattcctaccaggaaaaacttccatttcctttcatatctcacaccaatcagcattccatgaaacacagggtaggccaggcgcactggctcatgcctgtaatcccaacactttgggaggcagaggcaggcggatcacctgagatcaggagtttgagaccagccagcccaacatggcaaaaccctgtctctactaaaaatacaaaaaattcactgggcgtggtggtgggcacctgtaataccagctacttgggaggctgaggaaggagaatcgcttgagaccaggaggcggacgttgcagtgagtagagattgtgccactgcactccagcctgggtgacaagagcaaaactctgtctcaaaaaaaaaaaaaaaaagaaagaaagaaagaaaaaaagaaacacaggataaaaactgaaaaaggtatccatgaataaataaatatacactgaagaagtgaaaccattttcttctgttcccttcatcaaacatgagaggccagaaggcccgtagaaatccacgttctgacaaaatccagctgaccacactttcctgaaggattccaggccatcagacgtagacagatcaagttggttgaaagaaaatattcctctgcaaaagaagtcattttaacctgcatgtataacatttgttatagactcactgattcctttgactctgtcccatttcactaggctaggaagctactgggaagacagaactcaggcatgaagaagaaggtatggcaacttaggcagcgccccctcacccagcaaaatccccagtcatgaacgtcaagggcagtttcccacctatttttaccttacatacacaaacatactaagaagacaaaatgccagaagagttttttctggcagatacataacaaggtaccctatgacttgctaaccttgaggaacaggttaagagttgcaatttctgagggatttcattcaagtccagatggtttgatggtgaatttgaccatgattataaaatacacgaagggatcagcagtgcttttctccaaaagaacataaaatcctctttctcaaatttcaagaggaaatgattcctgaccagtcactatgtgatactacattgtgtaatgtcaaggcaaaataaaataaggggaaagatgggttcttttggttttcttagaaatgggaacttgctccgtcatccacactggagtgcagtggcatgatcacagctcactgaagccttgatctcctgggctcatgtgatcctccctcctgagtctctcaagtagctagaactatagtcgcaagacaccatgtctagctaatttttaaattttttgtagagatggggtcttactttgttgctcaagctgatctcaaattcctgcctcagcctcccaaagtgctgggattacaggtgtaaaccaccacacctggctggaaagatgggttctgagaaagaatgaaatgtcctcaagatagcctcttacaaaatattttttaaattctataaatcccctaaaaactgttgaagagtcaacaaaaagttcttctccaaatgtagcaggaataatgaatatctaacaatggtcaaagtcttctgaagaacaacatgatagcttccctaacctttaacaagaattctgaatgctggccaggtatggtggctcatgtctgtaatcccagcactttgggagcctgaggcaggcagatcacttgagttcacttgagtcaggatcatttgagttaggagtttgagtctgacctgggaaacacggcgaaacctcgtctctactaaaaatacaaaaattagccaagcatgttgacgcgcacctgttaccccagctacctgggaggccgaggcaggagaatcacttgaacctgggaggtggaaagtgcagtgagccgagattgtgccactgcactccagcctgggtggcaagactctgtctccaaaaaaaataaaaaaaaaaataggagaaccatggtaggcactgaggaaaaaagaccacatatctttcttacaataccacagaaggccacaacccaggccaggaacaaaggctcactaacaaatcatatgattacaaaatatgtcacacctcaggtaaaatgctcaattaaagcccaagaaggaaggtcagagacaaaaaaagaaacaaaagcaagggcaactaatagaaaaaagtaaaaaatatggtagatattaatacaactgtatcaataatcactttgaatgtcaatagtccaaatataattagaagacagatgctgttatagtggattttaaaaacatagtatgttggctaaaaggaaaccactttaaatacaaagacacacatattaaaagtaaagggatagggaaatatataaaatgctaacattaattaaaagaaacatggcatggctatcttaatatcacaaagtacacttcagagaaaggaaaaaacacagagataagccaggtgcagtggcacatgcctatggtcccagctacttaggaggctgagatggaggatcacctgagaccaggagttcaaggatataatgcgctataatttattgtgaatagaccctgcactccagcctggggaacagcgagaccttcatctctataaaaaaaatttaaaaaaaaaaatttttttggccgggcgcggtggctcacacctgtaatcccagcactttgggaggccaaggcgggcggatcacgaggtcaggagattgagaccatcctggctaacacggtgaaaccccgtctctactaaaaatacaaaaaattagccgggcgtggtagcaggcgcctgtagtcccagctactcgggaggctgaggcaggagaatggcgtgaacccggaaggcggagcttgcagtgagccgagatcgcgccactgcactccagcctgggcgacagagcgagactccgtctcaaaaaaaaaaaaaaaaaaaaaaaaaaaattttttttttaattaaccagttggggtatcacaaacttgcagtcagctacttgagaagctgaggcaggtagattgctgcagcctgggagttcaaggctgcaaagagctatatgatcacaccactgcattccagcctgggagacacagtgagactctgtctctaaaaaaaataaattaaatttttaaaataaataaagagatataagtgagcatcacataatgataaaggactcaacatgccaagaaaacctgacaacccttagtgtgtgtttgcataacaagcgttgcaaaatacatgtggcaaaatacaactgatagaactgcaaagaaaaaatacactaatctacttgtatagttggagactgcagcacccctccagcagtaattaagagatccaacaggcagaaaatctgaaaggacatagtaaagtaaatagcatcatcaaacaactggatttaattgaaatgcatggaatacttcatctaacaatagcaaaacacaaattcttctcaagttcacaggaatattcacaaaaataaaccaaatactggggcataaaacacaccttaatatgaaaaattttaaaaaatcatacaaagtatgctcagaccacaagtcattcatctagaaatcaataacagagatagttaccaactcccccaaatctttagagattaaacaacacaattctaaataagcacatggatcaaagaagtctgagaaatcaaaaataatttttgacctaaaatgaaaatgaaaacaaaatttatcaaaaattagggtatgcagcaaaagcagtgcatagaggaatatttacagcattgaacacctacaccaggaaagaacaagggtttataatgaatcatctaagagtctacttcgggctgggtgcagtggctcacgcctataatcccagcaatttgggaggccaaggcgggcagattacttgaggccaggaattggagaccagcctggacaacatggtaaaacctcgtctctactaaaaatacaaaaattagctgggtgtggtggcgcatgcctgtaatcccagctactcagtaggctgagatacaagaatcacttgaacctgggagatggaggttacagtgagccaagatcatgccactgcactccagcctgggcgacacagcaggctgctgtctccaaaaaaaaaaaaaaaaaaaaaaacagaaaaaagaaaagagtctacttcaggaaaacagaaaaacaagagagcaaattaaacccaagtaagcagacagacagacagaataattggagaagtcaatgaaatggcaggaaatcaatagagattaaaaaaaaaaaacagaagtcggttattggagaacaccaataaaactgataaacctctagtcatggtaagaaaaaagaaattactaagatcagaaatgaaaggaggcaaaagtaaaaactaaagaacatttgacaaaatctaccatccactcacggtggcaaactgggaatagagaacttcctcctcagaaagaacatcaatgaggaacctgcagctaacatcatacttaacagtgagaaactagatgctttctacacaagaccagaaacagggtaagaatgtcttctctcaccactactattcaacaacatccttaaagtcctagataagcaacaagacagaggaaataaaaagtatatcgatttagaaggaagaaataaaattgtctttgctgcataagacatgattatataaaatatatagatggcatataaacatatgaaaacatgcatattttgtcactggggaattacaaatttaaaaattaaagactaacacaacctttattagaatggctaaaatttaaaacactgagaacaccaaatgatggcaaagatgtgaagcaataggaaccctcatttgttacttgtgggaatggaaaacagtgcacctattttggaagatggtcagtttcttataaaactaaacatactcggccaggcacagtggctcatgcctgtaatcccacaactttgggaggccaaggagggtggatcacctgaggtcaggagttcaagacccgcctggccaacatggtgaaaccttgtctctactaaaaatacaaaaattagctgggcatggtggcacatgcatgtaatcccagctactcgagaggctgaagcaggagaattgtctgagcccaggaggtggaggctgcagtaagccgagatcttgacactgcactccagcctggacgacagagcaaaactctgtctcaaaacaaaactaaacaaaacatactcaacatataacctaacaatcatgctccttggtatttatcaaaataagctgaaaacatgttcacacaaaaacctgtacatggatgtttatgggagttttattcataatttctagaatttagagttaaccaagagattcttgataaacaaatgaacaatctgcagtacatccatatgattaaatataatcatatggatgaaaagaagatatcaagccatgataagacatagaggaaatttaaaagtacgtcactgggccaggtgtggtggctcacacctgtaatcccagcactttgggaggcagaggcgggaggatcacctgaggtcaggagtttgagaccagcctgaccaaacggtgaaacctcatctctactaaaaataaaaaaatcagccgggcatggtggcggacacctgtaatcccagctactcaggaggctgaggcaggagaatcgcttgaaccaagggggcggaggttgcagtgagccaagatcacatcactgcactccagcctgggtgacagagtgagactccgtctcaaaaagaaaaaaagaaaagtatgttactaagtgatagaatccaatctaaaaaggccatatacaatgtattaccaactataagatattctgcaaaagacaaaactatgggacatgaaaaagtctttggttttaagggatttcaggatgcaaagggcagatgaatgaatgtgtaaactataggtgatttttagggcagtgaaactaccctaacagaaataacacatgtcattaaacattgtcaaagtccagtgaatatacaatagtcaactctaatgtaaaatgtaaacattaatgcatccatattggttcaactgtagtaaatgtaccacagtaatacaatatataaaaaatagggcaaactggccgggtgcggtggctcacgcctgtaatcccagcactttgggaggctcagacaggcagatcacgaggtcaagagatcgagaccatcctggccaacatggtgaaatccatctctactaaaaatacaaaaattagctgggcggagtggtgcgtgcctgtagtcccagctacttgggaggctgaggcaggagaattgcttgaacccgggaggtgcaggttgcactgagctgagactgtgcgactgcattccagagtggcgacagagcgtgactccgtctcaaaaaaaaaaaaaaaaatagggcaaaccgtaaagaagagtgatcattaaataactctgtacttaatgatcaatttttctgtaaacttaaaactgttctgaaaaaaatctgttacaaaaagttaaaatgaagagactcatgactgaaaagtaactaatcactgaaccatgttttttctttttttgagacagggtctcattttgtcacccagattggagtgcagtggtatgatcacagctcactgcagcctcaacctccaaggctaaagtgatccttccacctcagcctcccaaggatctgggactacaggtacatgtcaccatgctcaggaaatttttgtattttttgtagagacggggttttgtcatgttgcccaggctggtctcaaactcttgggctcaagcaatctgcctaccttggcctcccaaagtgctgacatggcaggcgtaagccaccacgcctggcccatatcatatttcatgcaactgatttgaacttattttagtaagccattatggtcatgaatgaggtcttcagccaatgccttgtttaggagccctgcactgtatattccgagaagttaggagcccagcactgtatattctgagaagttaaattagggccttggttaccatcagtactgtctagaattcggacatggatgagtatccatggtattgtggacttcgtataagatatgtattggccaggcaaggtggctcacatctgtaatcccaacactttgggaagccgatagagtgagccatcacatccagccctgaagtcttattctcattggtaaatacaagaaaaacagtaacagattatatagatttggaatgaacctgaaaactcctaatacttttaacagatggtttttagtatatatgtgcaatcataatcacaattttcatcacctcaaaaataagcccatgtactttttacctgtcaatctcctatcctcccatcttcttctgccagtccccagcccttgataagcagcaatctttcggtctctatagattttcctattatggacttccatataatcagaatcatgccatgtggtatgtgactggcttcattataggtttctcaagtcacatccatgttgtagcacgcatccccactttgtatttatggtagaattatattccactggatggatattacacattttctttatctatcatccaatgatgtattacagtcagccctccatacttggagtttctgtatcctcagattcgaccaccctctgatcatgtactatgtgattaggtctatgatggttaggtatatactgaacatgtacagactttttcttctttttattattccctaaacaacacaatataacaactattttacctaaaatttatgttgtatcaggtattataagtgagctaaagatgatttaaagtatatggaagacaatgttttctaagccgggcgtggtggctcacgcctgtaattccagcactttgggaggtcgaggggggcggatcacctgaggtcgggagttcgagaccagcctgaccaaaaaggagaaaccctgtctctactaaaaatacaaaattagccaggtgtggtggcgcatgcctgtaatcccagttactggggaggctgaggcaggagaatcacttgaacccgggaggcggaggttgcggtgagccgagatttcgccattgcactcccgcctgggcaacaagagtgaaactccgtctcaaaaaaaaaaaaaaagaaaaaaaagaaaagaaaatgttttcttaatttccattttgggttgttcagtgacaatgtataaaaataacagatttttgcaggttccatttgtatgctaccaatttgcttaattcatttattacttctaagtgcgtgtgtggggtgggggaagttcttggaagttctacatgtaaaatcacataatttgtgaacaggaaaaaatttccttcttcctgtccaattctgatatcttttctttttcttgtctaattactctgactagaacatccggtactatggcgaatagtagtggtaaaagttaactaagtctcaatagatttttttaaatagaataaaaaataatagtaagttaaaatataaaatgattgtataacacacattcaacatacgaatatacatttacactgttaatatataaatacaaaataaagtaaaatataaaataatattagctcggtgcagtggctcacacctgtaatcctaacactttaggaggcaaagacaggaggactgcttaatgccaaggagtttaagaccagcctggacaacatagtgaaatcctgtctctattaaaaaaaaaaaaatttggccaggcgcagtggctcacgcctgtaatcccagcactttgggaggccaaggtgggtggatcacgaggtcaggagttaaacactagcctggacaagatgatggaaccccatctctactaaaaatacaaaaaaattagccaggcatggtggtgggcacctgtaatcccagctacttgggaggctgaggcagagaattgcttgaacccaggaggcggaggttgcagtgagccaagattgcgccattgcattccagcctgggcaacacagcaagactctgtctaaaaaaaataaataaataaaaaataaaaaaattttaactagtcgagtgtggtggcacaagcctgtaatcccagctacttgggaggctgacacagaaggatacttgagtacaagaggtcaatgctacagtgagctatgattgcgccactacactccagtctgggcgacagagcaagaccctgtctcaaaaaaaaaagtatcaactttagttaataataatgttattggtttgccaattttcatcattatcagatgtaatatgttggtttataatcataactaatacactacactaacgcagtatgttaaaaataggggaggtaggccaggcgtggtggctcacgtctgtaatcctagcactttgggaggtcgaggcaggtggatcacctgaggtcaggagttcaagaccagcctggctaatgtggcgcaatccagtctctactaaaaaaattcaaaaaaaaattagctggacatggtggtgggcgcctgtaatcccagctactccggaggctgaggcagaagaatcgcttgaatctaggaggcagacattgcagtaagctgagatcgtgcctcctgtcaccacactccagcctcggtgacagaacgagactccatctcaaaaaaaaaaaaaaaaaaataggggaggtagggaaaaggggctctgtaatagctcccaaatttttctgtaaactatgaattaaaaaagcaaataaactaacctttcatggaaaattctagtgtaaaaaaagaaagctggctgggcacagtggctcacgcctgtaattccagcactttgggaggccgaggcgggtggatcacaaggtcaggagttcgagaccatcctggctaacatggtgaaaccccatctctaataaaaatacaaaaaaaaaaaaaaaagagtagggcaaggtggcacgtacctgtagtcccagttacttgggaggctgaggcaggagaatcgcttgaacccaggaggcagaggtagcagtgagccgagatcgtgccactgcactccagcctgggcgacagagcgacaattcctctcaaaaagacaaaaaagaaaaagaaaaaggccaggcgcagtggctcacgcctgtaatccaagcactttgggaggctgaggtgggcggatcacaaggtcaggagataaagaccatcctggctaactcggtgaaaccccatctctactaaaactacaaaaaagaaaaattagccaggtgtggtggtgggcgcctgtagtcccagctactcgggaggctgaggcaggagattggcgtgaatctgggaggcggagcttgcagtgagccgagatcgcgccactgcactccagcctgggtaacagaacgagactccgtctcaaaaaaaaaaaaaagaaaaaagaaacctgacattccatagtacacacagtataatgccacttgcgtaagattcattcaaaaatgaaatatgtaactgactggcttaaaataaaatatattgacatagggttgagtacacaggttaagaaaagcaaggaaattatcttataatctataacactggccccatctggaaagagaatggatgatttggcttctaggaatcatttcaagtggggcatgtggtgagaagtcttcaaagtcgtggcctggctgtcatgagactgacattccctttacaatgtttcagttgactgtgcaactgttttatgtagtttcctcatatgcaatatgtttagtaagtttccacaatgaaaactcaatacacaaataagtctcagtgtactccgaattttgagcatcaagccattgaagtcaacatttaaaagagagcatagggccagtgtggtggctcacatctgtgatcccaacactttgggaggctgaggcggacagatcagttgaggtcaggagttcgagaccagtctggccaacatggtgaaactccatctctattaaaaatacaaaaaccggctgggtgtggtagctcatgcctgtaatcccagcactttgggaggccaaggcgggcagatcacaaagtcaggagatcgccaccatcctggctaacatgatgaaaccccgtctctactaaaaacacaaaaaattagccgggcgtggtggcgggcgcctgtagtcccagctactcgggaggctgaggcagaagaatggtgtgaactcgggaggcagagcttgcagtgagccgagatggcaccactgcactccagcctgggtgacacagcaagactccgtctcaaaaaaaaatcagccaggtctggtggcaggcacctgtagtcccagctactcgagaggctgaggtaggagaattgcttgaacccaagagtggaggttgcggtgagctgagatcataccactgcactccagcctgggcaacagagactctgtctcaaaaaaaaaaaaagacagcatagccccagcctcaggaatgtggcaaaaccctgtctctacaaaaaaaaaaaaaaaaaaaaaagaaacacaaaaattagctgggtgtggtggcacgcacctgcagttccagctactcaagaggctcgagggaggaggatcacctgagcccaggaagtctaggctgcagtgagccattgactgcactactgcactccaccctgggtgatggggttaagaccctgcctcaaaaaacaaaaatagctaggcagggtggctcacgcctgtaatcccatcactttgggaggctgagatgggcggatcacctgaggtcaggagttcgagaccagcctggccaacaaggcaaatgcccatctccactaaaaatacaaaaaaattagctcggcgtggtagaacgcacctgtaatcccaactacttgggaggctgaggcaggagaattgcttgaacccaagaggcggaagttacagtgagccaaaatcgcgccactagactccagcctggggatggagactctgtctcaaaaaaaaaagaaaaaaaaaatcaaattaggaagcactacatggagaaatggcatagatccttagaaaagaggctgaatattaccatgatatatgcttaagctgtcccaaatacagtgctttatttaattccataaaattcacaaccagatttgcttggtatgttattaaacttaagaaatgctatttctgccaggcatggtggctcacgcctgtaatcccagcactttgggaggccgaggcaggcggatcacatggtcaggagatcaagaccgtcctggctaatacggtgaaaccccgtctctactaaaaatacaaaaaattagctgggcgtagtggcaggcacctgtaatcccagatactcaggaggctgaggccgaggaatcgcttgaacccgggagagaagaggttgcagtgagccaagattgtgccactgcactccagcctgggtgacagagcgagactctgtccaaaaaaaaaaaaaaaaaaaagaaatgctatttcttggcagggcatggtggctcacgcctgtaatcccagcactttgggaggctaaggtgttcaagaccagcctggccaacacagtgaaaccccgactctactaaaaatacaaaaattagccgggtatggtggtgggcgcctgtagtcccagctactcgggaggctgaggcacaagaattgcttgaaccgggtaggcagaggttgcagtgagtaaagatcacggcactacactccagcctgggtaacagagtgagactctgtctcaaaaaaaaaaaaaaaaaaaaaaaggtttaagaaacactacttctaggccaggcacacacatggaatcccagcattctgggaggccaaggtaggaggatcacttgaagccaggagttcaagatcagcctaggcaacataatgaaacctcaaccaaaattaaaaattagctgggcatgatagcacgtgtctgtagtcccagctactcaggaggttgaggcaggaggatcgcttgaacccaagagttgtaggctgcagtgagctatgatcacgccagtgcagatcatgcctggtgacatagggggaccatctcaaggaagaaaggaaggaaagaaagggaaaggaagaaagaaaagaaaaaaggaaaggaaggaaggaaaggaaaaaaaggaaagaaaggaaggaaaagaaaaaagggccgggcaccatagctcatgcctgtaatcccagcactttgggaggccgaggtgggtggatcacctgaggtcaggagttctacaccagcctgaccaacatagtgaaactctgtcactactaaaaatacaaaattagcagggcatggtggcacatcctgtagtcccagctacttgggaggctgaggcaggagaatcaattgaatcccggaggcagagtttgcagtgagccaagatcatgccgttgcactctggcctgggcaataagagagaaactccaccacaaaaaagaaaagaaggggccgggcgcggtggctcacgcctgtaatcccagcattttgggaggccaaggcgggcagatcacccaaggtcaggagttcaagaccagcctggccaaaacagtgaaaccttgtctttgtaaaaatacaaaaaaattagtcaggcgtggtggggtgcacctgtaatcccagctactcaggaggctgaggcaggagaatggcttgaacccaggaggtggaggttgcagtgagctgatatcacaccactgcactccagcctaggtgactgagtgaaacttcgtctcagaaaaaaaaaaaaaagagagaaggggaggggaggggaaggggaaggggaaggggaaggggaaagggaagggaccacttctaaaaactgaaatagccgggtgcagtggctcatgcctgtaatcccagcactttgggaggccaaggtgggtggatcctgaggtcaggagctcgagaccagcctggtcaacatagtgaaaccctgtctctactaaaaatacaaaaaattagccaggcatggtggcacacctgtagtcccagctactcgggaggctgaggcaggagaatcacttgaacccgggaggtggaggttgtggtgagccaagatcacgtcactgcactccagacggggcaacaaagcgagacttcgtctcaaaaaaaaaaaaaaaaaaaaaaacaactgaaataggactcaaatatctaaaaacagcaaagacttcgtacagtacactgttagaaaatgttacagcctgaatctgtgtgtccctcccaaaattcatatactgaaattctaactcctaatgtcgttgcattaggaggtggcatctttgggaggtaatcggggttagagaccatgagggtggtgccctcataaatgggattagcacctttagaagaaatgacaggagacagcttgcttcctctctcctctgccttgtgaggatataatgagagatgatgatctgaaaaccacaaagcaggcccttaccagacactacatctgccagcacttgaacttggacttcccagcctccagaactgtgaaaactacatgtgtgctgttcaagccacccagcctatggcaatgtattacagcatccccaggtgactaagacagtacagcactttctcaaccatacatcagggttatgaaataattaggacactatggcagtagcagaaagataaaccaaagaaatatgggaaattctgaaaccagggcatctatgtagggtatgtgaacctatgacagagcaggtatggtcagtcagggacagaaacgacggacagttaaaccccagcagcagtgataacccatcttctgccatcatctccacataatgttgtgaattcagtgtagagctgtctattgcagtgaattcttaaaattgtatgctacctcagaagccactttgaatatggctttaactttctcataccagaagcagggcttagtcacccttaatacagtttccagttctacgcctcctcccatttcctccatgtggtcaatccagttatctgccttacacagccgcctccctgtgaccacctccgcatgagacggctagatacaaactgctggaaatcatccaactgaccctacacaaggaatgcacagagaggctgcagggaccacctctcagtcaccatgtgactccacgaaattcccatctggttgctctaaactcaccaactagaactcccacagagtctccaataaaggcatctgcccagattcctctgtcttgctccctggttaggtgtgtatatcaggtctgaaacagccaccctcttcctgttggcctacaaggagaactatcctttctctctgggatctattacctagcagcctgtttcacccacagtcacaaggaaacccacattcagaaggttaaacaagcctgaggaccattcatgtgaagatgtggcccactcctaagagatgagtgagggagccgggtgtggtggctcatgcttgtaatcccagcactttgggaggccaaggcgggtggatcacctgaggtcaggagtttgagaccagcctggccaacacggagaaaccccccgtctctactaaaaatacaaaaaattagctgggcgtggtggcgcatgcctataatcccagctactcaggaggctgaggtaggagaatcacttgaacccaggaggcggaggttgtggtgagccaagatcgcaccattgcactccagcctgggcaacaagagcaaaattccgtctcaaaaaaaaaaaaaaaaaaaagaaatgagtgagggaaacatcctgggagctccacgcaccctactctcctctcctcatgatgtgattcacggtctcgattctcaccagtgaccagatgtttacctggagtcagtttaaggttctgacctctggtgtcctttctgtgacacccgaagtgtaaacaccgaccagttctaacagcaggtgtctaacagttcagttctgacaccactcagaattaggacagacctacaagttcagggctcagtctcacaacatgccagttcacatgccagtcacaagccgcagggccacccacacttctgaacaactgtgtacaaatcgtgagctcccataatctcctcctcgggttcaataatttgctaaaactattcaaagaacttagcaaaacatgttacttaagtataactcaggaacaggcaaataagagctgaaaaatggcagggaaaggggggtggatataggcaacgctcctcatcttggggtgcaccaccctcccagcacatcaatgtcctcatcaacctggaagtactctctgaatgtctttgctcaaaaatttttacacaactcaatctccagcctccactctttcctggggtagggaatggagcttaaagcaacaaccctctagtcatgggtttggtctttctggtcaccagtctccactctgaaagtatccaggggttccacagaatcacctcattagcttaaaactcaagtatggtctgaaaggggattgttgtgaataacaaaacacactccacctatcacttagggaattccaagggttttaggatccctgtcccaggaactgcagacaaacaccaaatatatttattacaccacagaagcaaatacactcgtaaattcataaaccttttctccagcagaaagaagccaaaggtgtctttctctaagtctgaccctcacagacatttgcagaaattacactctgactaaaccaactctgtggatacaaaaccaaattgctgacaatgttgaattttacccaagctctataatcctacagaatagctatgattaaaacactctccaccaccaccaccacccttggtgttccagagaagcagcatactgcgggggaaaaaaccctattactaatttagacgtcctttattttacctataagaaagccagacaggcggctgggtgcagtggctcacgcctgtaatcccagcactctgggaggccgaggtggacggatcacgaggtcaagaatcaagatcatcctggctaacacggtgaaaccccgtctctactaaaaatacaaaaaaaaaattagccaggaatggtggtgggcacctgtagtccaggctactcgggaggctgaggcaggagaatggcgtgaacccaggaggtggagcttgcagtgagccaagatcgcgccactgcactccagcctgggtgacagagcaagactctgtctcaaaaaagaaaaaacaaaacagactctccaaattcccattgtttacttcataaacaattggctggacagttttgtcttcactgatcagtcaaaacaaaatatctctaaatccaaccttaatggttaagtttctctcctcctttcagccctgaactttgacccatcctccacagcctaaggaagcacccacccaatccctcctttataaaccatcctaaaaacagactaacctcaggaaaaatattctctgacctaggatccgattttgcactttccactctgccctctcctcccacctattcctaatcttatttgttcctccccatgaatgaaaaacttttttaggggaagaggaggggagacagggtcttgctctgttgtccaggctagagtacaatgccagaatcattgctcactggagccttgatcttctgggctcaagggatcctcccacctcagcctcggctgggactataggtgtgcaccaccacaattttttttaattttgtagagagatggtcttactatgtgtacaggttagtctcaaactcctgacctcaagcaatcctcctgtttcggcctcccaaagtgctgggattatagatgtaagccgccacttccaccagaaaagcctttttctgcctaacctctgggatgcttgcagatcttgtatctactgctttcaccttttcgttatactcctttcacataaagtcacttcttacctaactccggatttcttgtatttgaggatgtctagaaacaactctctcaaatcatgggagcccatggtttactgttattatctgaacaattaactattacaacctcagacagggtatcaccctcccaactatgcctatgtgtgcatccccagcttcccagtggtctgtagcttctctcagtataaaggacccctcccctggttggagtgataaggctgggatgcctgccaagttctacccaggaagaaccaactgggacttcaatgacctccctttgcaggctcttagttgggagtcactctgaggcacacttggcctcagacctctgcttccttagacaagactatattcacttactttttttttttttttttgagactgagtttcactcttgttgctcaggctggagtgcagtggcacgatctcggctcaccgcaacttccgcctgctgggttcaagcaattctcctgcctcagcctcccgagtagctgggattacaggcatgcgccaccatgcccggctaattttgtatttttagtagaaacagggtttctccatgttggtcaggctggtctcaaactcacctcaggtgatccacccacctcagcctcccaaagggctgggattacaggcatgagccaccacgcccagtttcacttatttttaagtaagaaaatatcctgtgtttgaagaatccagcaaaatcactcaaacttaccatttatgtatataggaggaaaggaaactgtaagacatttgtattctttttttttttttttttgagacggagtctagctctgtcgcccaggctggagtccagtggcacgatcccggctcactgcaacctccgcctcccgggttcacgtcattctcctgcctcagccacccagcagctgggactacaggcacacaccgccacacccggctaatttttgtatttttagtagagaccgggtttcactgtgttagccaggatggtttccatctcctgaccttgtgatccgcacaccttggcctcccaaagtgctgggattaaaggcgtgagccaccgtgcccggccaattttttgtattttttagtagagacggggtttcaccatgttagccaggatggtcgcgatctcctgacctcgtgatccacctgccttggtgctgggataacaggcgtcagccatcgcggctggcaagacatttgtattctatagcttaaacatgaaaagcacatttatctatccctttcagacaatagagacctcacattattgttacttccatgacaacttctttactaatatttaattcactaatatttaatatttcaaagtcccatctgataggatttagcattaatcaccaaagtccagatgaaaggatacagaacagttatccattacgacaaaatctctaccctgcaaaggagaagatattttagagaatctctgtatttcaccaattaatgtggaaatgtattcgtttctctgtagccataatggaagactgaatttccctacttatctgagattcttatccgcagtagcattctcaaggctaagttctgggattgatctgaaatcacccaaaagaagaaaatagacctgagaaacctaccatacatgttgcggagaggaaactacacaaataagattttttaacaaattgaatgtaagactagataattgttttccctcaaatctactttctgcctctttctcccctttgtgaccctccctttgcaaacactttatcttgtctttcaagcactactgataaaatacattctacatttaatgaaaaacaggatcaaataagcaaataaaccttttcaagggtttacaaacccagggagaggcaatgctgacctggaatacagacatttatctgattccaatgtcaggtgaggtcaccctatcccctaggacatctcccagccccaccctggctcactgagtgctcagtgaccaacctccctgaagacagtgaattgtgccctgctcactctgccccaagcgcattttaactttcaggttctcgcaccatttcaatggggcaggttttccttctcctttgagatagttttcctcccttcactagactaaaaacaatccagaggtcaggaatcatttgtgtcttttcctctcagtaacagcctaagattgggtaaccatcaatgtgtccctaaggaacggaaactggggttgaggaagaaaagctgagcgtcccaaagggtaaacttttcagaggaaggggataccgggagactcctcccacctcagggcatacagctgctcccgtgagaggccccacccctacaccttaagctgtcctctgggaggagtgacccaggggttgataatcactagatcctccaagagaagtggcagctgtgggtatcctgggtcaggcccaggcagttctgaaaatcaggaccaggaaaagatagagggccacatcaccttgtaaagtttccaaaggggaaactccacccaaagacattctgattaggcgtcggggcttaggaaagataaaaggaggggaagcacaaaaatttttttaccacggccgggcgcggtggctcacgcctgtaatcccagcactttgggaggccgaggcaggcggatcacctgaggtcgggagttcgagaccagcctggccaacatggagaaaccctgtctctactaaaaatacaaaattagccgggcatggtggcgcatgcctgtaatcccagttacacgggaggctgaggcaggagaatcgcttgaacccaggaggtggaggttgcagtgagctgagatcgcgccattgcactccagcctgggcaataagagcgaaactctgtctcaaaaaaaaaaaaaaattttaccgtagagtgtcaggttcttattctccgtttccctctcaggttacaagtacacaaacaagaggccgggcgcggtggctcacgtctgtaataccagcattttgggaggcggaggtgagcggatcacctgaggtctggagtttgagaccaacctggccaacatggagaaacccagtttctaccaaaaatacaaaaagtagccggtcgtggcggcgcatgcctgtaatcccagttactcaggaggctgaggcaggagaattgcttgaacccggaaggcgaaggttgcagtgagctgagatcttcccactgcactccagcctgggcgacagagcgaaactctgtctgaaaagaaaaaaaaaacaacaaacagaaaacaaatcctttcaaaagagtatggtgaaagaaactataaacaactaaaatactgtgtcttaaatgtcaaacaaaaaacagctgataatgttgatttggcgaggggaggtcacctttgggaatgcggggaaggaaccggaaatttaggcatttatttccagccccagaaaaagctaggctaaaaaaaacgggagtcgtaggtttgagattctttttccagtacgtttggaagactcggaggaagaccagtcccccggaaaaaaagacgatgtactgggaaggccacagcccacagctcttcccatgcacgaaccgcacacccgagacgggattccgccttatgaccctcccgtgtcccagtacaaacaatctggagagaggcggggctgcgggcgcggagctgcccagacagggctccgaggccgaggccgcagtcgccgcgcagggacgggacaggacgcctggggtactggctacggcccaacccaccctgcggccgaggggacagagggccgagctgcgccagggaactcgggtcccagaccctggagtcgctgcagggaggccagggtgcttccacagccggttccggccggttcccacaagcccctcccccagtctccaggcgcccggccccgcacacgcaccatttcctggcttccagggtgtcccggggtcctgcctacggctctctccggcctgtgcaggtcccagcgcgccagacgctgcggtggagccaccggggccactggagaagcggagaccggaacccaaacgcagcggacacgaaacaggaagaccccgcggagttgttgaacattgcccctgtcccccttgcagagttcctgattggatggtttgcaggttcccgccccagtgcccctgattgggtgatgattcaagtcctgcccccttggtactgagtgacaggagaagcaatgcggtatgtggctgagtaaagacagattgacagggtcttggccactgcccttcgcgggccgggcttcctccttctgtaaccttctgtgccggggaggatatttgcatttaagcagaaagtgtttcaggctctgcagaggtgacactggcgtgtttctgcactcagggtgcccttcctgccttttcctcccggacacagagtcacaagtgtgcacagggaatgacagactcggcgtccagtggagccatcccctggcctcggagtaggaggcgcgcccaggccaggccagaccacagtgtaacaggagggaggagggcttgcttctttcaggcaagaaaattaaaacggacaaagaaataaaagtattaaatgtataggaaaaactggagtttttatgacagcgatcatctataaagaaaccaagagaagtaagcaaacatttgaactagctcagacaagcagcctgcttcacccgcagttcacaaggaaaacccacaatcataacgttaaaaatattcccaagcgccgggcgcggtggctcacgcctgtaatcccagaactttggaaggccaaggtgagaaaattgcttaaggtcaggagttcaagaccagcctaaccaacatggtgaaaccccatctctactaaaaatacaaaaattagccaggcgtggtggcaggtgcctgtaatcccagcaactcgggaagctgaggtacgagaatcgcttgaacctgggagggggaagttgcagtgagccgagatagcgccattgcactccagcctgggcgacagagcgagactaaaaaatgaaatatgaaatgaaatgaaataatgaaatgaagaaatgaaatataaaataaaataatcccaagcttgggacccagactctaactgctgaaatggaaccccagtgtggatcagaacctggtgatgagacagggacacttaagaattcaactttgggagctcaaggtgccctccagtcctctcctcacagtgtggaaacactctttccttcaaaaccttcatttgtaccagcaggaaactctcacccggagtcaatgtaaagtcgtgacctaaataaattgtcatgttcccaaaccttttctccaggggacaatgcaaacaagtttttcactgagtctgaccctcacagattttcttcatgtatacaaattacagcctgactcagcgaccccatgaatgctaaaaccaaaacactgtccaggaaatggccccaggcgccaaaggtacaacctcagaaaagacagaaccctccacccccaacccaaccacatctgcacatgggtctcctgcttttcacagctctgcagcttctcagaatccacattcctggccaggcgcggtggctcacgccagcactttgagaggcccaggcgggcggatcacctgaggtcaggagttcgagaccagcctggccaaatggtgaaacctcgtctatagtaaaaatacaaaaattagccgggcgtggtggcgcgtgcctgtaatcccagccactcgggaggctgaggcaggagaaccgcttgaacccgggaggcagaggttgcagtaagcccagactgcgccactgcactccagcctgggtgccaaaacagtgagactctgcctcaaaaaaataataaaagtaaaaaataaaattaaaattaaaaaaagaatctgcactcctgagcagctggaggccacctgcaagggcgggcaggctgcccaagaagcaccctttccctctctttgcaggctccagactggtctcaggctctcctgcccactgcagtttattcacttgcttctcaccaacactgatccacttaggtaagaaaaaagaccttcaatcccctttgctgtttgtttgtttttaagaaactagcagagttcctgctttccttctgtggttatgtataagctggaagacaaaaaattctaaaatactttatatggattttaaaactggcaagtaatgattcctttgagaaaacaaagatatcagctatgctattatgatttatacattggtttccatccatgcttcctgactcataactcccatagtccttgttacagtaaacagaaactctctctctctgaccttctcctgccccccattcacctgtccactgcagaactctaatgtgatcgtgggtcataagactctcactccaaagagtgtcctgtcctgtacgctggggaaaggaatgctacacagaagccaaaaattatctggacaggggttggatgcagtggttcacgcctgtaatcccagcactttgggaggctgcggagggaggattgctcgagcccaggaattcaagaccagcctgggaaagatgtcgagaccccatctctatgaaaaataaataaaaaggccggacgcggtggctcatgcctataatcccagcacttcaggaggctgaggtgggcggatcatgaggtcaagagatcgagaccctcctggccaacatggtgaaacccccgtctctactaaaaatacaaaaattagctgggcgtggtggcgcgtgcctgtagtcccagctacttgtagtcccagctacttgggaggctgagccaggagaatcacttgaacccaggaggcagaggttgcagtgagccgagatcactactgcactgcagcctggccgacagagtgagactccgtctcagaaaaaaatatttttctttttatgtattattattattattttgagacggagtcttgctctgtcgccaggctggagtgcagtggcgagatctcaagttgctcactgcaacttccgactcctagggttcaagcgattctcctgccccagcctcctgagtagctgggattacaagtgtgtgccactaagcctggctaatttttgtatttttagtagagatggggtttcaccatattggccagactggtcctgagctcctgacatcaagagatccacccgcctccgcctcccaaagtgatgggattacaggcaagagccactgtgcccagcctaataattttttgtctcctttctttaaaactgttttaggtgtggcgtcacatggcgtggcagcacatggtgtggtggtacatgcctgtaatcccagctactcaggaggctgaggcaggagaatcattgaacccaccaggcagaggttgcagtgagccgagatcttgccactgcacttcagcctgggtgacagagcaagaccctgtcgaaagaaagaaagaaagagagggagggagggagggggagagagagagaaagaaaaagaaagaaagagagaggagaggagagaaaagaaagagagaaagagggagggccgggtgcagtgcggtggctcacgcctgtaatcccagcactttgggaggccggggtgggtggattgcctgagctcgggagttcgagaccagcctggccaacatggcgaaatcccgtctctactaaaaatacaaaaaattagctgggcgtggtggcgggcgcctgtactcccagctactcgggaggctgaggcacgagaatcacttgaacctgggaggtggaggttgcagtgagtcaagatcgtgccactgcactccagcctgggtgacagagtgagactccatctcaaaaaaaaaaaaaaaaagagagagagaaagaaagaagggagggaaggaaagagagagaaagagaaagaagaaggaaggaagaaagaaagaaaggaaggaaggaaggaaggaaggattataccagtgctggggaggacataagagaaactggattctactcctactcctactcctactttggtggtggaaatgtaaaatggtacagagagcgcggtgagacgcagagtgcggccggcttgccgagtcccaagcaggcaggtgagctggagggcggggatgtcccgggacaggccgcggcccctgccccgcagacaccggggccctcgctgtgccgggcacagacgaagccccagccgagacgcagcgcctccaggtggctgcgggagcggcgggcgggaagcggggcggtcgcgatggggcgtcagggtgcagagggccctggaggcggtctagggacacaggctcggccgccttgctttagaccaggaagccgcgcagatccgggacctgggggacctctctgtcccagtggggcgagacctacctagccctgacgatagcggagaatagccttaaccggcctggaaggtgaacgagtcccctgactacgagtggaacgattagcggccatgcggctgttcgccttcgttctaccagaccttcatgtggaagagagaaatggtaaaatggcctggcacatgtggtcctgggaaatccccagcaccctttgggaagatttactgaccgtctatagaaggcctgtgtaggccaggcacggtggtggctcacgcctgtaatcacagcactttgggaggccaaggcggatggatcacctgaggtcgggagttcaagaccagcctgaccaacatggtgaaacccggtctctactaaaaatacaaaaattagtcgggcgtggtggcggacgcctgtaatcccagcttctcgggaggctgaggcaggagaatcacttgcagtgagccgagctcgcaccattgcactctagcctgggcaacaagagtgaaactccagctcaaaaaaaaaagaagaagaaggcctgtgtctataataggaaaaagctgctcaacttctccctcaacctaaaattttttttatttatttaattttatttgtttgagacagagtctttctctgttgcccaggctggagtgcagtagcgcaatcttagctcactgcaacctccgcctcccgggttcaagtgattctcctgcctcagcctcccaagtagctggtactacaggccacaccaccacgcccggctaatttttatatttttagtagacggggtttcactatgttggtcaggctactctcgaccccctgacctcgtgatccgcccgcctcagcctcccaaagtgctgggattacaggcgtgagcaaccgctcccgggtttgtttgttttgtttgtttgtttgttttgagacagagtctcactctgtcgctcaggctggagtgcaatggcaggatgtcagctcactgcaacctccacgtcgcgggttcaagtgattcttctgcctcagcctcccaggcagctgggattacaggcacccaccaccacgccccactaatttttttgtatttttgtagaaattgggtttcaccacatttgccaggctggtctcaaactcctgacctcaggtgatctgctggcctcagcctcccaaactgctgggattacaggtgcaagccaaggcgcctggcctttcctaggaattttaaaacaaaatatgcaaaatatattcatttacgaactctacatttgtcattgcactccagcctgggcaacaagaacgaaactccgtctcaaaaataaataaataaataaataaaaataaaaaataaaattcctatgaaatattgtcttctgaaaatttgagcatttttgcccactgggttgatggagacagaaagggttctaggccagaatgttcatatttggaagactttcaaattataactgttgtcacatgtttgcagtttattcaagactgctgttacatagtggaaaaattaactccttacttcaaatgtctagtctacctagatgtttggaagtgtcccacgtatattaaatatagaggtagtgaaatatcactgtaaatatctttttgttaaaatttataggaaacactgccttttggaaattgaattgtttaaccacctttgtgagcagtgtagtactgtgtatagttgttcgatagtttagaggaggtgggagggaagaaattgcaaaaggtaataggccagtgtgttcataattggacattttcagacactatttttctgtatgttttgtgcattttgttttgctctgtatatagcatatacaatgggcaaatgcatcctgattttgcaacatctaattgctggatgttaaagaggttgccagtgtgtgataaagtacttagtaaatttagcatattttgtatactttgtgttgaaattcataggaaacttgtcttctgtggatgacttttggataggagtttgttcaaccatctctaagcattacacatgcgtgtacttgtccactggattgaaagcagagagaaggaagtgaggagggaatggttcaaggccaaaatggtcatatttaggagatacctcagattataaccacggttacatgtgtggaattttatttaacagtgcgtgtacatggtggacaagttagatgaaatatctagtatttctagatatttggaagtgcttcatgtatttaaaagtagtagtagcataacactgttttttgtttttgtttttgttgagacggagtctcactctgtcacccaggctggagtgcagtggcacgatatcggctcattgcaacctccgcctcctgggctcaagcaattctcctgcctcagcctcctgagtagctgggattacaggggtgcaccaccatgcccagctaccttttgtgtttttagtagagacagggtttcaccatgttggctaggctggtcttgaactcctgacctcagatgatccacccacctaggcctcccaaagtgcttggattacaggcatgagccactgcgcccggcaaataatactttttgtaaataacttttaaaaactgatggggctggggccaggcacggtggctcacgcctgtaatcccagcactttgggagtccaaggcaggtggatcacgaggtcaggagatcgagaccatcctggctaacatggtgaaaccctgtctctactaaaaatacaaaaaattagccaggcgtggtggtgggtgcctgtagtcccagctacttgggaggctgaggcaggagaatggcgtgaacctgggagacggagcttgcagtgagctgagactgcgccactgcactccagcctgggtgacagagcgagactgtgtctcaaaaaaaaaaacaaaaaaaaaaaaacaactgatggggcacagtggctcacgcctgtaatcccaacactttgggtggctgaggctggtgaatcatttgaggtcaggagttccagaacagcctggccaacatggcgaaaccctgtctctactgaaaacacaaaaagtagctaggcttggtggtgagtgcctgtaatccctcagctactcaggaggctgaggcacgagaaccgcttgaacccaggaggcagagactgcagtgagctgagatcgtgccactgcactccaacctaggtgacagagtgagactctgtctcaaaaaataaaaaaagaaaaaaaactggtgggaaatactctttggaagtagaattgttgaaccacctctgtgaacagtgtactctctgtacttgttcattgggttgacggaggtgggtgagatgaaatttcctgattaggacattgtactacagctatgcaacatgttaccattgagagaaaatggctgtataatttcctacatgtgaatatgcaatgacctcaaaataaatttttgttaaaaagtacaccactggccaggtgcggtggctcacgcctgtaatcccagcactttgggaggccgaggtgggtggatcaggaggtcaggagatggagaccatcctggctaacatggtgaaaccccgtctctactaaaaatacaaaaaatttgccgggtgtggtggcgggagcctgtagttccagctactcgggaggctgaggcaggagactggcgtgaacccaggaggcagagcttgcagtgagcggagatcgcaccactgcactccagcctgggcaagagagcgagactccatctccaaaaaaaaaaagtataccactggattctgcaaacctcccgagcacacgtcggtagccggctccctggctgtctgaattaccaagctgtctccccagctgtatttccaaaatgtcgctttctaacaagctgatgctggacaagctggacgtgaaagggaagccggtcgttatgagagtcgacttcaattttcctatgaagaacaaccaggtaacaaacaactggaggattaaggctgctgtcccaagcatcaaattctgcttggacaatggatccaagtcagtagtccttataagccacctaggttggcctgatggtgtccctatgcctgacaagtactcctcagagccagttgctgtagaactcaaatctctgctgggcaaggatgttctgttcttgaaggactgtgtaggcccagaagtggagaaagcctgtaccaacccagctgctgggtctgtcatcctgcgggagaacctccgctttcatgtggaggaagagggaagggaaaagatgcttctgggaacaaggctaatgctgatccagccaaattagaagctttccaagcttcacttcccaagctaggggaagtctatgtcaatgatgcttttggcactgctcacagagcccacagctccatggcagaagtcaatctgccacagaaggctggtggttttttgatgaagaaggagctgaactactttgccgaggccttggagagcccagagcgacccttcctggccatcctgggcagaactaaagttgcagacaagatccagctgatcaagaacatgctgggcaaagtcaatgagatgattattggtagtggaatggcttgtaccttccttaaggtgctcagcaacatggagattggcacttctctgtttgatgaagagggagccaagactgtcaaagacctaatgtccaaagctgagaagaatggtgtgaagattatcttgcctgttgactttgtcactgctggcaagtttgatgagaataccaagactggccaagccactgtggcttctggcatacctgctggctggctgggcttggactgtggccctgaaagcagcaagaagtatgctggggctgtcactcaggctaagcagattgtgtggaatggtcctgtggggttttttggggttttttgtttgtttgttttttgagatggagtctcactctgtcacccaggctggagtgcaatggcgcggtcttggctcactgcaacctccacctccctgattcaagtgattctcctgcctcagcctccccagtagctgggactactggtgcgtgccaccacgcccggctaatttttgtatttttagtagagaccggtgtttcaccatgttgaccaggctggtctcgaactactgacctcatgatctgcccacctcggcctcccaaagtgctgggattacaggcatgagccaccgcgcccggccttctgtaggggtttttgaatgggaagcttttgcccggggaaccaaagccctcatggatgaggtggtggagacactgccacttgctgtgtagaatggaacatggaggataaagtcagccaggtgagcactgggggtggtgccggtttagagctcctagaaggtaaagtccatcctggggttgatactcttggcaatatttagtactttcctgccttttagttcctgtgcacagcccctaagtcaacttagcattttctgcatctccacttggcattagctaaaactttccatgtcaagattcagctagtggccaagagatgcagtgccgggaacccttaaatggttacacagaatctcagctcatctctactgcaaaaattcaaaaagtgaggtgagaggatcgcttgatcctgggaggttgaggctgcaatgagccataatcttgccactgcactacctgggagtgacaccctgtctcgaaacaacaacaacaacaacaacaaactggcactccacattcaaagggaagagaattaaactccatttaaagggactaaacgtttctgtctcccacctccaataaattaatataataaatccctactctccagtgtgctggtatttgcagatggggcctctgggagataattggtgaggtcttgagggtggggcacgcatgatggaatgagttaccttataagaagagacaccagggccgggcgcggtggctcccgcctgtaatcccagcactttgggaggccgaggtgggtggatcatgaggtcaggagatcgagaccattgtggctaacactgtgaaaccccatctctactaaaactacaaaaaattagccgggcatggtggcgggcacctgtagtcccagctacttgggaggctgaggcaggagagtggcgtgaacccaggaggcggagcttgcagtaagccgagatcgcgccactgcactccagcctgggccacagagtaagactctgtctcaaaaaaaaaaaaagaagagacaccaggctgggcgtggtggctcacacctgtaatcccagcactttgggaagctgaggcaggaggatcctttgagcccaagagtttgaggttgcagtgagctatgattgtgccacagcactccagcctgcgtgacaaagcgagaccctgtctcaataataataataataggctgagtgtagtggttcacacctgtaatcccagcattttgggaggcctaggtgggcggatcacctgagaacaggagttcgagacagtctggccaaaatggtgaaaccccatctctactaaagatacaaaaattagccgggcatggtggtgggcacctgtaatcccagctacttcggaggctgagacaggagaatcacttgacctcaggaggcagaggttgcagtgagccaagatcgcaccactgcacttcatcctggacgacagagtgagactctgtctcaaataatactactactaataaataataataataatgaaaaaacaccagagacctctctttctctctgtctttctctctgtcacccctatgccctcttcccaacttgaggacacaaccagaaagtagccatctttgagccaggaagaaagccctcaccaagaacagaatctactgtcattttgaccttggacttcatggtgtcaagaatcgtattttgttattgtattttgttattttgtaatcgtattgtattttgttatagtggctcaagtagagtaaaagacagaaatggcaagaaagttaaacccatcccactagaggtttgtcatggaggggacagagcgttgggtttaggcctgagctttggagttggaaagaattgagttcatacttaggcggggaccttgaacaagtcccttgagttctctaaacctcaatagccccttctgtaaaacgaagataataaagttgttgtgagtgcaccttgaaactgcaagacacatgtcttagcaccaggtaggcactcaataaatagaggtagtgctattctttttattaatgtctttctagttggtcatgctaatgatatagtgggacaggcagaactgggtcttcaagacttcaggtgccaggctgaggagcttggacttgcacttgagagcactagggagccatgggaggtgtgtgagcagggaagagagagaaaaatgtccctttggtgccgaggtgaatgactaggaattgaagtttgggagaccaaggaggacactttgacaggtacccaggtgagtgtctagacctgggtggtggcaattgggatgatgggagtgagaagaaataagtaggtcaggcttggtggctcatgcctgtaatcccagcactttgggaggccaaggtgggtggataacctgcggtcaggaattcaagaccagcctggccaacatggtgaaaccctgtctctactaaaaatacaaaaattacccaggtggggccaggtgcagtggctcacgcctgtaatcccagcactttgggaggccgaggcgggcagatcacaaggtcaggagttcaagactgggctgaccgacatggtgaaactcttgtctctactaaaaatacaaaaattagccaggcgtggtggtgcgtgtctgtaatcccagctactcgggaggctgaggcaggagaattgtttcaacccgggaagtggaggttgcagtgagccgagatcatgctactgcactccagcctgggcaacaagagtgaaactctgtctcagaaaaagaaaaaaaaaattatccaggcatggtggcaggtacctgtaatcacagctgccagggaggctgaggcaggagaatcacatgaacccgggaggtgaaggttgcagtgagccgagatcgcgctactgcactccagcctgggtgacagagtgagactccgtctcaaaataataataataataataaataaataaatacataaataagtagttaagtagttcaagatgagtattgggtatagggcttgaatggtagctccacgacccaggtcggaagtagcagttaagaggggttggggtcggggtatcaatgtcagttttcactttgcctagaatattttttcttgttgtgtcttcctgaaatattcttactggtctttggagacactgcccaaagatccctcctctgagaatctccctggaacatgtgtggtcctgcaaagctgctgctcatgatgttatcctacaaacatccaaatcccggcatatgagtttctctagggcagtctctggctggttccattgtaggatctgtccacgccctgcatatgcctggtaccaaaaaaggaaactgggtctgcaggacgttgctgcagttcaggcattggccgcgtgggggcagaagtgcacaggtcaaagcgtctggaaaaagccctcaggctgcaggaccagcagagcatcaccaaggacgtccctggttgagaactacgtctttttattcgttttaaaggggcgcataggcactaggatccagttttgtccacctaacccacccacccagcgacacacgccccgcagcccatagctggaggatatttacgcaaaacctaaatcagatcagtctttcctttgctcagaacattttttttttttgagggacggagtcttgctctgtcgcccagactggagtgcaatggtgcaatctcggcttactacaacctccacctcccaggttcatgtaactctcctgcctcagcctcccgaatagctgggattacagatgtgagccaccacgcccagctagtttttgtatttttaatagagacggggtttcaccacgttggtcgggctggtctcgaactcctgacctcaagtgatccacccgcctcggcctcccaaagtgccgggattacaggcatgagccatcgcgcccagcctgctcagaaccatttgtggctcccacttaacccagtgggagtgctgaaataacttaaacattttacatggcatttacaaatgcgatattttattctttaatcctttaaaatctctccatcaataaaactcttcagaagtccttaccagttgttacaaatctaaaatataaatatacaaataagtggtaatgtatgttctctcaaacattctgacactacttctacactcaaccaaattgtgatatacttttccatttaaaattaccagtcttggccggacgtggtggctcacgcctgtaatcccagtactttgggaggccaaggcgggtggatcaactgaggtcaggagttcaagaccagcctggccaacatgatgaaaccccatctctactaaaaatacaaaaaagttagccaggtgtggtggccggtgcctgtaatctcagttacttgggagggtgaggcaggagaatcgcttgagcctgggaggcagaggttgcggtgagccgagatcaagccattacactccagcctgggcaacaaagcaaaactctgtcttttttttttttttttttaaaggaacctcgctctgttgccaggctggagtgcagtggcgtgatctcagctctctgcaacctccgcctcctgggttcaagcgattctcctgcctcagcctcctgagtagctgggactacaggtgtgtgccaccacgcctagctacttttttgtattcttagtagagatggggtttcaccatgttggccaggatggtctcgatctcttgaccttgtgatccacctgcctcagactcccaaagtgctgggattacaggcgtgagccaccgtgcccagcgaaactctgtctttaaaaaaaaaaaaataccagtcctggtgaggcgcagtgtctcccgcctataatcccagcactctgggaggccgaagcgtgtggatcacttgaagtcaggagttcaagaccagcctggccaatgtggtgaaaccccatctctactaaaaacacgaaaattagccgggcgttgtggtgcatgcctgtaatcccaactatttgagaggctgaggcaggagagtcacttgaacccagaaggtggaggttgcagtgagctgagatcatgtcaatgcactccagcctgggtgatagagcaagactccctctcaaaaaaaaaaaaaaaaaaaaaggccgggcgcggtggctcatgcctgtaatcctggcaccttgggaggctgaggtaggcagattgcctgagctcaggagttcaagagcagcttgggcaacatggtgaaaccctgtctctattaaaaatacaaaaattaaccaggcgtggtggcgggcgcctgtaatcatggctgcccaggaggctggggcaggagaatcacctgaacttgggaggtggaggttgcagtgagctgagattctgccagggcactccagcctaggcaacagagtgagattctgtctaaaaaaaaaaaaaaaaaaaaaaaaagccgggtgcggtggctcacgcctgtaatcccaccactttgggagatagaggctggcggatcacgaggtcaggagatcgagaccatcctggctaacacagtgaaaccctgtctctactaaaaatacaaaaaattgactataaatcatgctgctataaagacacatgcacacgtatgtttattgcggcactattcacaatagcaaagacttggaaccaacccaaatgtccaacaatgatagactagattaagaaaatgtggcacatatacaccatggaatactatgcagccataaaaaatgatgagttcatgtcctttgtacggacatggatgaaattggaaatcatcattctcagtaaactatcgcaagaacaaaaaaccaaacactgcatattctcactcataagtgggaattgaataacgagaacacatggacacaggaaggggaacatcacactctggggactgttgtggagtagggggaggggggagggatagcattaggagatatacttaatgctaaatgacgagttaatgggtgcagcacaccagcatggcacatgtatacatatgtaactaccctgcacattgtgcacatgtaccctaaaacttaaagcataataataataaaataaaataaaataaataaataaataaaaatagaaaagaactatgtaccattaaaaaaaaaaatacaaaaaattagccgggcgtggtcgtgggcgcctaaagtcccagctactcaggaggctgaggcaggagaatggcgtgaacccgggaggcagagctggcagtgagccgagattgcaccactgcactccagcctggacgacagagcgagactccgtctcaaaaaaaaaaaaaaagtattgaactgttgttgatgatgtgagcaatggagaattaggagggaagtgtacagccttgtgtaatttatattaacatgcgtaaaaatcgagatggatgaagcgatatctacaaagagattaaaacaagctgggcacggtggctcacgcctgtaatcccagcactttgggaggccgaggagggcggatcacctgaggtcgggagttcgagaccagcctgaccaccatggagaaaacctctctctactaaaaatataaaattagctgggtgtagtggcgcatgcccgtaatcccagctactcaggaggctgaagcaggagaatcccttgaacctgggaggcagaggttgcggtgaaccgagatcatgccattgcactccagcctgggcaacaagagtgaaactccatctcaaaaaaagaaaaaaaaaacacacacaaatatattcaaatattaattgcgttatctaggggtatgtgggtgtttaagagaacctaaatcctgttatccataatagctacaccattttacattcccactaacaatgaaaagcattccaaattctatggatcctcaccagcacttgttattttctgtgattttgacgaacgtgaagaattatctctttgtgcttttgatcttcatttctcttatgacttgtaatgttgaacgtctattcctatggaggctttttttttttttttttttttttgcattttttaaagacagggtctcactctctcaccctggagtgcagtagtgcaatcacagctgactgcagcctcgaactcctggactcaagagaccctcctgcgtcgatcccaaaatgctgggattataggcatgagctactgtgccggccaatatcaagacacttttccaagtgatgagaccagccatttagtctatccttaaagaactgagtcatggaaatttaatcatgtcaatagtcttttttacattattaaccaaacaaaaatgagttccttttaaagatttttttaagattaggaaatagctgggcttggtggctcaagcatgtaatcccagcactttgggaggctgattgcttaaatccaggaatttgaaactagcccagccaacatgctgaaatcctgtcttcacaaaaaaatacaaaaaattatcgaggtgaggtggcacatacctgtaatctcagctactggggaggctgaggtgggaggatcacctgagcctggggaggttgaggctgcagtgagccctgatcctaccactgcactccagcctgggcaacaaagtgagatcctgcctcccaaaaaaagttggagcggggaggctgggtgcggtggctcacgcctgtaatcccagcactttgggaggcccaggcgggtggatcatgaggtcagaagatcgagaccatcctggctaacatggtgaaaccacatctcttctaaaaatacaaaaaaaattagccgagggtggtggcgggctcctgtagtcccagctactcaggaggctgaggcaggagaatggcgtgaacccgggaggcggagcttgcagtgagccgagatcacgccactgcactccagcctgggcgaccaagcaagacaccgtctcaaaaaaaaaaaattggagcggggaggaggagccacatcaggatggtacagtggatgcctaatgattttacaataaaactctcacaaaattgttcttgttcaacaaaaggaatgtgcaggagcactgtcatggtggtgaaggactctctggtggaactttcctggatatttttctgccaaagctttggctgactttctcaaaacactcataataagcagaggtttttattctttgaccttccagaaggtcacacttagtactatgttttttgttttggcttggtttttttgagacagtctcactctgtcacccaggctggagtgcagtggcccgatctcggctcactgcaacctctgcctcccaggttcaagcgattgtactgcctcagcttcccaggtacctgggattacaggcgtacagcaccatgcccggctaatttttgtatttttggtagagatgggggttctctatcttggccaggctggtctctaaatcctggcttcaagtgatccacccaccacggcctcccgaggggctaggattacaggcgtgagacactgtgaccggctggtactatgttttgaacataggaattgtgaggcctctagctttgttcttgtttttcaagattgttttggatatttcagattcttggaagtttcatatacattttcagattcttttttctatttttgcaaaaaaatgccattgaatttgttatgaattgcattgaatctgtgcatcagtttgagtagtgatttacaattggataatttcacaatattaagtagtctaatctatgaactggggatgttgtgagaatatagagaaaaacaaatcaacacaatttctctgagtgttaggcttttccatacacacccagcaagcaattctgcagaggattcaccagctagatatcctcaaattctattcaattccaatactatctatctggagatagcatcacatcccaaagatcaaggacaatgttccacaagactgtccctcatcttagatgccagtcacaagccagggcctctagaacttctggaccaacttaaacactggggttccgaaaaccccttccttgagtttaattagtgtgatatttaatattgagtgtcaacgtgattgaaggatgcaaaatactgtccctgggtgtgtctgtgagggtgttgccaaaggagattaacatttgagtcagtggactgggggaggcagacccaccctcagtttgggtgggcaccatctaatcagctgccagcgtggctagaataaagcaggcagaagaaaatgcaaggagctgacttgttgagtcttcccgtcttcatctttctcctgtgctggatgcttcctgccctcaaacatcagacttcaaattcttcagctttgggattcttggacgtacaccagtgatttgccagggtctctcgggcctttggccacagaccgaaggctacactgtcggcttccctaacttttgaggttttgggatttagactgatccaccactggcttccttgctcctcaacttacagactatcgtgggactttaccttgtgattctgtgagtcaattctaataaactccctttcatatatacagatatcctactagtctttccctctagagaaccctgactagtacgatttgctagaacagctcagaaaactcagagaaacatattagtttaatttaccccccttttttttttctgagacggggtcttgccttgttgcccagactggtcttgaactcctgggctcaagcgatcctcccacctcagcctctcaagtagctgggactacaggctcatgccactgtgcccaattttgtttacccacttattacaaagaatattacaaaagatacaggtgaacagccagatggaagagatgtatgactctaggtgtgacacctttcaggaacctccacacgttcagctccccagaagctcccggacccaggcctttcaagttgaatggagtcatcattatgtagtcatgactgattacattattgcccattgtttatcaacttaaccttcagtccatctccccactctggaggtccaaaggaatggagctgaaagttccaatcctataatcacatggttatttcctttgctacctgcccccccatcctgaggctatccagcaggcccaagccatcagtcaactcattagcatacaaaatgtcacttatcacttttaagactcaaaaaattttaggggttatatgacaagaaacgggaagaagattgctatggtatgaagacagtagggacaccttttattagcggcctgtggaccccaagcatggaaataaagaaaaatcctgagtttaaaggaaattctaggcacctagtgaagccatgagaagcaaataagtaacttgttaaacaagaaggtaatagatctaaaacaatagctcaggaagttagaggcccagatatgtttgctttccccatataaactaagggtaagatcttttttttttttgaaagggagtcttgctctttcacccaggccagagtgcagtggcgctatctcggctcactgcaagctctgcctcctgggttcacgccattctcctgcctcagcctcctgagtagctgggactacaggcgcccgccaccgcgcctggctaattttttgtatttttagtagagacggggtttcaccgtgttcgccaggatggtctcgatctcctgacctcgtgatctgcccgcctcagcctcccaaagtgctgggattacaggcgtgagccaccacgcccggcaggataacatcttaacatacatcccggagttgtctttcagaggcttggaaccccactgaggacccccgctgaacagatccattcactggcacagactcctagataaggaagaagtgaagactaaacttgacctttgttctgtttcttccttgggggattagagaaagtcactccctgtaaccagttatttttctactgacccctgtcaggcctctgagcccaagcctgcacgaatacatccagatggcctgaagcaagtgaagaatcacaaaagaagtgaaaatagctggttcctgccttaactgacattaccttgtgaaattccttttcttggctcagaagctcctccactgagcaccttatgacccccactcctgcccgcgagaaaacaaccccctttgactgtaattttccactacctacccaaatcctataaaacagccccacccctatctcccttcactgactctttctggactcagcctgcctgcacccaggtgaaataaacagctttactgctcacacaaagcctgtttggtggtctcttcacacggacacgcgtgacaacccgatttttcttttttttaatcttatgacctcatttttctcagagatgaagtcttgttatgttgcctaggctggtcttgaaatcctggcctcaaatgatcctcttgcctaggcctcgcaaagtgctggcattacaggcatgagccaccgcacctaacttaaagttttttttttttttttgaaacggagattcactcttgttgcccaggctggagtgcaatggcgtgatctcaactcactgcaacctctacctcccgagttcaagcgattcgcctgcctcagtctcccaagtagctgggattacaggtgtgagccatttgcccagcctagcttaaatttttaaacaaaacttctctcttccttttttttttgtttgtttttgagatggagtctcgctctgttgcccaggctagagtgcaatggcgcaatcttggctcactgcaacctccgcctcccgggttcaagctattctcatgtttcagcctcccgagaagctgggattacaggcacccaccaccacgcccggctaatttttgtatttttagtagagaccagttttcgtcatgttgatcaggttggtctcgaactcctgacctcaggtgatccgccggcctcggcctcccaaagtgctgggattacaggcgtgagccaccgcgcccagcttacttctttcttccttaaccaattgcaaatgtgatctttgaatctacctgtgacttatgagccccacttcaagatattccattcttttaagcttataccactgtgtaacctccatgtactgatttatgattcttgcctgtagcctctgctttcctgaaatttacccctgccttttccgtgtgtgtctgtgtgtgtgtttcccctgctgtctttacaatactcctgcctttaaaaactcttacctgcggccaggtgcggtggcttacccctataatcccagcactttgggaggccaatgtgggcagatcacccgaggtcaggagtccaagaccagcctggccaacatggtgaaaccccatctctactaaaaatacaaaaaattagctgggcgtggtggcaggtgcctgtaatcccagctactcgggggcggggacgggggagactgaggcaggagaattgcttaaacccaggaggcagaggttgcagtgagccgagattgcaccattgcactccagcctgggtgacagagcaagattccgtctcagaaaaacaaaacaaaacaaaacaaaaaacccaaaaactcttacctgcaagctattgggagctcaagtcaggccaggtgaggtggctcactcctgtaatcccagcactttgggaggccgaggctggtggatcacaaggtcaggagatcgagaccagcctgaccaacatggtggaaccccatctctactaaaaatacaaaaaattagccaggtgtggtggcacgtgcctgtagtcccagttactcgggaggctgaggcaggagaatagcttgaactccggaggtggaggttgcagtgagctgagatcgcgccactgcactccagcctgggcgacagagtgagagtctgtctcagcactcctgcctgggccatagagcaagactctgtctcaaaataaataaataaataaattatagagtgtaccttcttacatttagtgggactcctagatataactgattcctgggattgattaatcccatgaaggattgtcagttagtgcattacagagatgttaaaattaaaaattttaacccgggaggcggagattgcagtgagccgagatcgcgcctccagcctgggcaacagggagactccatctataaataaataaataaattaattaaatggggcctagctatgctgaccaggctggtctcaacttcctgggatcaagtaatgctcccaccttgtgtcctaaagcactggcattacaggtgtgagctactatgcctggcctcacgttgacatctgatctccaaagcagctgttttgagaggtgcggccaggtggcaggtgtttgggtcaaaaaggcaactccatcacaatagattaacgcccttctgttattgctttcacaggaatggttcccacgagagtaggttattaaagggtctgtcttccttgatgtcctcttacttcctgtctcaccacgtgatctctgcacacgctggttccccttctgctttctgccgcaaatgtaggcaggtgaaaccctctccagatgcagcctgaacaagattttactaatgagaagagcatgaagtctttcatgaggcatctaccctatgacttaaacacctcccactaggcctaaaaccactacactggaccatatttcaataactatggagaagacattgaaaccctagcaggaatttcctggatgacaacagatgctttacataatttaaggatactgggatttattcaggtttgaatacgtttgttgagctacaggaatgccacaggggttgtcccttataacccagaggatcagggtctctgttgagatagaggcatgggcagcggcagcagcagaggtacttaaaggtccagctgagtgtgaacttcaggacaccatctaatggtagcttccccaccttctcttctttcgcattttttcttttttcttttttttgagatggagtctcgctctgctgcccaggtttatgtgcagtagggcaatcttagctcaccgcaacctccacctcccaggttcaagtgatactcctgcctcagtctcctgagtagctgtgattacaggtgtaaaccaccacgcctagccttctttctcacttttttttttttttttttgagacggagtcttactctgtcgcccaggctggagtgcagtggtgcgatctcggctcactgcaacctctgcctcccaggttcaagagattctactgcctcagcctcccgagtagctggcattacaggcgtccaccactatgcccagctaatttttgtatttttagtagagatggggtttcaccataatggccaggctggtctcaaacttctgacctcaggtgatctgtctgccttggcctcccaaagtggtgggattacaagcgtgagccaccaccactgcgccaggctctttctcattttcaaatgactgctctttcaggaatgaccactaatggggccccaacatgcacaagataaaatctcaccaccagcccccaccaccagacctacaggacaaggccaacacctagcatcagtcccagcttcattctacatagaaaggcaaagtgaaaactcctagcccagaccattttaaggagggcccaaatccgatactcctgctcctaaatgccaaagacttatagaaactgccatcttcggttggctaaatctggaacacaagtttgttcggcctcagcaatggaacacagagcagcaagcagcagcagctcaaagagcatgctggccaccaggtagcagagcaggttagcacctgagagaaagggaaagctgacccattgcatggtgaccaacatctagacatcctgctgacagtgccaactgttacggttgcctgaaaaggtgtgcttcagaggttgacaccgagagctatgtggtgcacacacacaccgagagtatgaaaaggcttattacaaaaatgaggtatcagagagaacaatgcagggctctcaagcaagtgtgacatggcgtgagagcaaggaagatggcattcctgtcccttatgagtactgatgcaaaaatcttgaaataaatgccagcaaagcatataaagcaatatattcaaagcattatgcaatataaccaagtgagatttgtccctggaatgtaaggatggttcaccatatggaaattgatcagtggaatacaccacattaggaaatgacggaaaaatgacagtctcaattgatgcaaaaaagcatgacataattcaacacccatttatgattaaaaatctgcaacaaacaaggaatataatttactcaaattgctacaaggcatatatgaaaaactcaataaaatctttgatggtgaaaaaccatatttttaatatctaatatcagaaacaaggatatttgctctcaccagctccattcagtgttaaggggggtgctcccagggaaatcaggcaagaaaatgcaagcattccagccgggcctggtggctcaagcctctaatcccagcactttgagaggccgaggcaggcagatcacaaggtcaggagggcgagaccatcctggccaacatggtgaaaccccgtctctactaaaaataaaaaaactagctcggtatggtggcacgcgcctgtaatcccagctactcaggaggctgaaacaggagaattgcttgaacctgggaggcagagattgcagtgagccgagatcatgccactgcagtccagcttggtgacagagcgagactgtgtctcaaaaaaacaacaaacaaacaaaataaccagccaggcagagtggctcacgcctgtaatcccagcactttggggagaccgaggtgggtggatcacaaggtcaggagattgagaccatcctggtcaacatggtgaaaccccatctctactaaaaatacaaaaaaatttagctggttgtggtggcacgcgcctatagtcccagctactcaggaggctgaggcaggagaattgcttgaacctgagaagtggaggttgcagtgagccaagattgtgccactgcactccagcctggcaacagtgagaatccatctcaaaaaaaaaaaaaaaaaaaaaaacctaaaagcattccatatttaaaaatatatataaatatatatacacacagccctctagacaaatatacaaaaatcacacacgttatcactgtacatacaggtggacagacacaaattcacaaacccacaggtgtaacagcccagatactaaaagattctcccaaatagaaggaccccaggtgttctgatctcttctccaggtttctctggctcctcgggaataaccaccacagtgccttatatatccttgcttgctttcgtgtcttccagaatgccaggatcaaggggacagagatattagcacagctttgttgactacacctattagagggagttacacagaggaaaatacttactgaatattaggactcacacagacacatacacaaaagggttttacaaaaacatcatcatagacccacatatacttgtccttcaaaaagtgaatgttctcactcccattcctgtagcagagataccccttagttccccaatacctatcacaaaagatggctccttgagcccattctgacagtgaaggaatctcgaacttcctgacctcccacagtacaataatcatctctctacaaaagcacaacatggcagctcaagaatgtgaaaggacctgaaatgggttgagtaataatgttccaacccctcatactaccataaatgttcctggtgagagaagcgaatgttcctggtgagagaagcgaaggtgtgcatctcctggctcagccaccaggtcctccactgcatctccacagtagccgtcacttccactgaggcctcatctgccagcaaaccttgctccagtcggcctctggaccctagtatcttcaccgtggttttggatgctgccacctgacccatccctgctgttgggggagggtggaggccagaggcctaaagagttccgacccgagcgacacaaagatcacttctgggacccacccagggagactgttgttacgagggtggatggtgacctggtttccctcaatgctgccacctcccttctaaaacacactgacttgctaagaaaaggggggactgactccaacaaaggacagacccgacccctatcgtgcctatgcaattcagaaaacggagaattcggaggctccagcaagcagtttattgggagttgagttcaccttgccttgtgatgtgaagcaaggtagttccatggcttgtgaaccctgacaccagcacctcccatacacaacagagctggagcgctgcagggtgggtccttttccaagaagagctaagtgctagtcttagcgggaggctaggaaaccagtcctggagcaggatgcatgtgacatgcactgacgtgagaaggccggagcatcatcagtgcatatgccgctgaatatctcagggtagaatgtgccagaaaacagggaaagcaagttaggggaggtaagaattctgagtgtcctacagctaagacatggcagagtgtgtctgtgactccactagcagttttgagattattctgactgtggtggttggtgcagggctggtaaccgcaggagagtggatgctgtgtggtcaaggggtgtgtgtcccatgatacaggctctgcttcttcagtctctcacctcagagccacctgcggttgccacagagaaattcagatgtgaatgtttaaacaagtgtccaaagtgtaggtttgagatgggaaatggagctggagatgacctcaaaacagccctggaataatgcaatgctgacaatgtctgtgaattaggatgtgcataggcagatcccacttggggaaaaactgtaagatgcgaacctttgtcttagaagtacagcattcccacagtctgacccgaggacactgatggaaacttaaaaggcagattctgggagtcttctcacttctctccagtcatgtgtgagagctgagggcaggcactgccctagagggtgtttcctaacttctgactggatgccacaaaaggcctgctggggcccaagtccttcttccccattcctttaattcttcctacgaagaatctcgacaatggttgcagatgtcattgaagatgttcccatattgcttacatttaagaaggtggctctccagtgtgggtggtttcatggttttaaaatgaactggaggccgggcgcggtggctcacgcctataatcccagcactttgggaggccgaggagggcggatcacgaggtcaggagatcaagactatcctggctaacacggtgaaaccccgtctccactaaaaatacaaaaaatgagccgggcgtggtggcgggcgcctgtagtcccagctactcgggaggctgaggcaggagaatggcgtgaacccaggaggcggagcttgcagtgagctgagatcgcgccactgcactccagcctgggcaaggactccgtctcaaaaaaaaaaaaaaagaactgggggccgggtgtggtggctcacgcctgtaatcccagcactttgggaggccaaggcaggtggattacctgaggtcaggagttcaagaccagcctggccaacatggtgaaaccccgtctctactaaaaatataaaaattagttgggcgtggtggcatgtgcctgtaatgccagctactagggggcctgaggcaggattgctttgacctgggaggcagaggttgcgccactttcactccagcctaggcaacagagtaagactccagctcaaaaaaaaaaaaaaaaaaaagtaaaacgaacaatttgggaggccaaggtgggtggatcatttgaggtcaagagtttaagatcagcctggtcaacatggtgaaacactgtctctactaaaaatataaaaattagctgggcatggtggtgggcacttgtaatcccagctacttggaaggctgaggcagaagaattgcttgaacccagaggttacagtgagccaggatcacaccactgcactccagcctggggcaacagagtgagacaccatcttggggtgcggcggggaaaaaaaggttgggtgctgtggctcacacctgtaatcccagcactttgggaggccgaggcaggcagatcacctgaggtcaggagtttgagaccagcctgaccaacatggagaaaccccatctctactaaaattacaaaattagccaggcgtggtggcgcatgcctgtaatcccagcttcttgggaggctgcggcaggagaattgcttgaatccgggaggcggaggttgcggtgagccgcgatcgcaccactgcactccagcctgggcaacaagagcaaaattacatctcaacaaaaacaaaaacaaaaaacaaaccccacaaaagatgggatggatatagaattttctttatagtttctctccagtatatattctcaggtgtctttaaaagattacgtgaagtgaaggctttcctacactccatacattcgtagcttttctgtccatggagtccattcacatatctgcaatcccgcaggagagtgcaagttcctcccccatttgttaaatatttcattgccgcatgagtcacgtcttcaaagggaattaggacaactgaaggcttaatcacaccgtttacattccttgaatttctctccagcgtaagtactctcatacatccaaaaggaactaatacaactgacagcattaccacactttactttcttagggcttctgtctactatgagtcctttcgtgcacgtgcaaagactttgagtaactgaaggctttaccacattgtctacactgaaagggtctttctccagtatgaattcttttgtgtactttcagggaatttaaacaagtgaaagctttgccacactgcttacactcacatggtttcactccagtgtgacttctttcgtgccttcgaaggtgactgaagtaaatgaagacccgaccacactgtttgcattcatagggtttctctctagtatgggttctttcatggattcgaaagtgagtggaataaagaaaggctttaccacattctttacattcgtaagttttctcgccagtgtgaactctttcgtgcaactgaaggtaacttgaagaattgaaggctttaccacattgtttacattcatagggtttttctccaaaatgagttctttcgtgcacttcacaggaactagatgacttgaaggcttccccacatttcttacatgtataaggttgaactccggtgtgggttttcacgtgttttcgaaggcttgagtgagaaaagaaggctctcccacattccctacatacaaaaggtttctctccagtatgagttttctcatgactccgtaagtacgtgggacaactgaaggctttcccacattgcttacattcataaggtttctctccagtgtgagtcctttcgtgggttagaaaaggctggtaatatataaaggcttttccacactgtttacatttgtagggtttctctccagtgtgatttttttcatggcgccgaagagcagtgagatatctgaatgccttcccacattccttacattcatagggtgtctctccagtatgaattcttatatggtttcgaaaggaaaagagaaatgcgaaggctttgccacattccttacattcatagggtttctctccagtgtgaattctttcatgggttcgaatactggagctgcgagtgaaggttttcccacattctttgcatttatgtggcttctctccatattcgtgacactcatttggtttctgttcagtgtgagatctcatgtgcctattaagggagacctgatgcatgaagacttccccacacacactgcagtcacatggttttaatccagtaggagtttccaggttcgtattaagatcaggaatctggctagtgctttttccacatggacaatcttctttattttcacagagtgcttcaaccataggacttctgtaaagaatgagtaccgtattattaatagttttgtattaatgatcttatatttattagcaagtaccagaattacattttaaatattttcacagaaactgtatgttatctgccctgtctaaattgttttgaaagctaatatactcaatagtctagaacaggccgtgaccatagctattatcaaaatagttaaaaaaaaattattattattatttttgagacggagtctctctgttgcccaggctggagtgcagtggcgtgatctcagctcactgcaacctccgcctcctgggttcaagtgattctcctgcctcagcctcccaagtagctgggattgcagacatgcaccaccacgccccgctaattttatatcttttttagtagagacggggtctcaaactcctgacctcaggtgatccgctcgcctcagcctcccaaagtgctgggattacaggcgtgagccactgcgcccagccaggatttttaaatgctgtttcatagtgatttcttctcacaccctgaacatctattgcttttttttttttcctgtagagacaggttttcactatgttgaccaggctggtgttgaactcctggcctcaagcaattctccagccttcacctaccaaaggctgggattagaggtattcgctaccttacccagccaatgacagtttctgttgtttttttagacggagtctcgctctgtcaccaggctgcagtgcagtggatcgatctcagctcactgcaacctccacctcccaggttcaagcgattctcctgcctcagcctcccgagtagctgggactataggtgcacgccaccacgcccggctaattttttgtatttttagtagagacagggtttcatcatgttggccaggatggtctcgatctcctgatctcatgatccactggcctcagcctcccaaagtgctgggattacagacatgagccaccacgcctggctgcccatgacagtttcaatgaaacaccttcagtaaaaattttctaagaatgaataaacctgaaactctgcttattgttttgcttgcttggcttttgaaatttatgaaatactaagattctctcaggggctatataattatttgtgaatgcaactcaccttagatttcttccctggtttttgtgttcatcttcaatatcctggtctttccatttttcccctaaaatacaagcccagagaactcacaataaattattagaaattatagaaaattataacactctaagatccatgattagctattgattagctatgacactgtctgatctacttactaaagtattctcttcccacattttttttttttttttgagacagagtctcgctgttgcccaggctggagtgcaatggcgcggtctcagctcactgcaacctcggcctcccgggttcaagcaattctcctgcctcagcctcctgagtagccagaattacaggcacctgccaccaggcctggctaattttttatttttagtagagacagggtttcaccatgttggtcaggctggtctcagactcctgacctcttaatccgcccgcctcagcctcccaaagcactgggattacaggcgcgagccaccgtgcctggccccttcccccattttaaaccttggaactcagttgttgtgcaagaaacacctgttccctccttaattaagtagagaaattatgtcacccttacctatacaggccaggttcttgaaggttgcccgcatcacatctctgtagatattcctctggccaggatccagcaaagcccactcctccagggtgaagttcacagccacatcctcaagggagatggagtcctaaaacatcccccatgtgtgtttaggaggaggagagagattcgcagtagtgaggatccattctcagaattcctgagaaattccatataatcctgtagtctcggtttagtggtataacttggttgtcagaactcttgactctttccatactcacttcctcataaatttaacactatcgtgaacatacaaaaattattgcgctctctctctctctctctctctctctctctctctctatatatatatatatatatatttttttttttttttttttgaaacattcttgctctgtcgcccaggctggagtgcagtggcacaatgtcggctcactgaaagctccgcctcctgggttcacaccattctcctgtctcagcctcccgagtagctgggactacaggcgcccaccaccacacccagctaattttttgtatttttagtagagacagagtttcaccgtgttagccaagatggtttccatctcctgacctcgtgatccgcccgcctcggcctcccagagtgctgggattacaggcgtgagccaccgcaccctgccattatttctatattttaactgtgatcacttgaagccttattgttctttttctttttattttttttgagatggagtcttgctctgttgctcaggctggagtgcaatggtgcgatcttggctcactgcaacctcctcctcccaggttccagtgattatcctgccccaacctcccaagtagctgggactacaggcgcgtgccaccacgcccagctaattttttgtatttttagtagagacggggtttcaccatgttagccaggatggtcttgatctcctgacctcgtgaatcgcccccctcggcctcccaaagtgctgggattacaggcgtgagccaccgcgcccggccaccttattgctctttaaatacagacccaagaccatcttggatatatgagagaaatgctgtacaaatgaaacaaattgtaagatcatcaattcctcgtgagaaaaactctttcattttctaccttattacatactgtaccactcagcatttcatgaaacttggggtcaaatctggatgagattttaataaatgaatacaccctttagactataagctgcacatctcccattgaggatgaaaaactgtgtatttttctttttcataaacaacatgagagatcaggaagtctgtgaaaagccagaagtcactggccatgttgccctgaaggatctcgggccattagaaccatgcaaatccaggtggctgaatgaaaatattcttctgcattagtattaatttcaacgtgtttgtgtaatatttatcataggttcagtttttcctttctgtctcatttcatgggtctaggaggttattggaaagaaagcacagcaacttggacctctataaacccctgtactcatgaaggtttattactcgcatgcttgagctctcaggcaaagctgtgtaactctcaagcacttgtgaagtggcttcggagagcaagaaaaggagcctggctggggatttttactgacattagggagtgggctagtgtgagttcaagcatacaggtggaggctgatgcgaattggctctgtcgccagcaccaaatgagggtgacccaggctttcttcctaccacgtccatatgtggggtacacagtggaaactgaggaatgaggttttaaagctgtgagcagtcaaaagccaggcggggtggctcacgcctataatcccagcactttgggaggcagaggtgggcagatcatttgaggtcaggagtccaagcactaaacctccagccctttttctctcccccgactttgggggctagggctagaggaagatcaagactgggtgtctttcgggacatcaatccccaccctgaagttaggtaggcattctttccagtagtcatttatttacaacaagagagggtccattacccttatcactcatgaaattccaagagatttaggaactctgtactaggaaccacacacaaagaccaaacaaatgtctttcttatcatagcaaagaacatcatggctcggggcacaggctcaccagaagacagatgattcataggattatatcatgtttccactccagccactggtaacagtgtgacattagagttttgtttttattttgagacccagtctcgctctgtcacccaggctggagtgcagtggtgcaatcttggctcactacaacccctgcctccagcattcaagcagttctcctgcctcagccaacagagtagctgggattacaggcatacacaaccacacccagctaatttttgtatttttagtagagacagggtgtttcttcatgttggccaggatggtgtcgaactcctacctcaagtaatttgcctgccttggcctcccaaaatgctaggattacaggaatgagtcaccactcctggcctgggtttttgttttaaaacagtagaacaggccaggtgtggtggctcacgactgtaatcccagcactttgggaggcggggggcgggcagatcacttgacatcaggagtttgagaccagcctggccaacatagcaaaaccccatctctactaaaaatacaaaaatttgccgggtgtggtgggcacctgtaatcccggctacttgggaggctgagggaagagaatcgcttaaacctgggaggcagaggttgcagtgagccaagatcgtgcccctgcactccagcctgggcgacagagcgaaactccacctcaaaaaataaaataaaataaaataaaataaaacagtagaatacaatgaaacaatattctatttctttctgcatgtttcacaattgaagaaatctctagagaaccccaaaaatgacagaacacagaaaaccagggacaccaaaggcaattttatctgacacctacagttactgaaaatagtaaacacagcctaaaatcaacaggataaacctaaaccctcacatttaaagcctgtttacctcagttccttttcaacaccatgcccagatctcaacaaaaattacaagatatattaaaagacttagacggtttgaagagagagtgcaggcatcagaaccagactgagatataaaagagatgctggaattatcagaccagaaatttatttcttttcttttttttttgagacagagtcttactctgttgcctaggctggattgcagtgacacaatctcagctcactgatactgtcatagtggataaaaaagaacacctggccaggcgtggctcacgcctgtaatcccagaactttgggaggccgaggcaggaggacctcttgaggtcaggagttcaagaccagcctgaccaacatggagaaaccctgtctctactaaaaatacaaaattagtcaggtgcagcggcacatgcctgtaatcccagctactcacgaggcaggagaatcacttgaacttgggaggcagaggttgcagtgaggcgagatcgcgccatggctctccagcctgggcaacaggaataaaactccatctcaaaaaaaaaaaaagaaaaagaaaaaagaatacctaatatatgttgtctgcaagaaattcgcttttttttttttttttactttgttttttagagacagggccatgctctgtcacccaggctggagtgcagttgtgggatgacagatgactataacctcaaactcctgggctcaaaggactctcacctcagcctctgagtagctggaactacaggtgtgcactaccatcccttgataattttgtttctttttatagagatggggtctcactatgttgcccaggcttgtctcaaactcctggcctcaagcaatcatcctgcctcagcctcccaaaatgctgggattacaggtgcgagccaccatacctaggccaacaaatccactttaaatatatcacaaagattggggggaggggggagggatagcattaggagatatacctaatgtaaatgaccagttaatgggtacagcacaccaacatggcacatgtacacatatgtaacaaacctgcacgttgtgcacatgtaccctagaacttaaagtataataataaaaagtaataataaataaatatatcacaaagatatattaaaaataaaggaatagagaaagatatactatgctaacactaattattattattattattttgagacaaagtctcactctgccacccaggctggagtgcagtggcgcaatcttggctcactgcaacctccacctcccgggttcaagcgattctcctgcctcagtctcctgagtagctgggattacaggcgcacactaccacacccagctaatattttttgtttgtttgtttgtttgagtcgaagtttcgctcttgttgcccaggctggagtgcgatggcgcaatctcggctcgctacaacctccgcctcccaggttcaagcgattcttctgcctcagcctcctgagtagctggaattgcaggcacctgccaccacgcctggctaatttttgtatttttagtagagacagggtttcaccatgttggccaggctggtctcaaactcctgacctcaggcgatccgcctgcctcccaaagtgctgagattacaagcgtgagacaccatgcctggtcaatttttatatttttagtagagatagggtttcaccacgttggttaggctggtggcaaactcccgacctcgtgatgtgcccgccttggcctccctaagtgctgggattacaagcatgaaccaccatgcccggccaacactaattttttaaaagctggcacagccttattaatttcagaaaaagctgacttcatagcatgaaattatcagtgatagaagggcattacatactgacaaaggggttaattcaccaagaagacaaggcaatccttactgtgtatgtacataaccacagagtggcaaaatatatgaggggaaaactaatacaactgcaggaagaaatacatgaattcactggtacagctgtatatttcaataacccccagcattaatttagagatccagcaggcagaaatcaggaaggacataattaaattgaacagcaccatcaaaacaactggacttaattgaaatccagaataattcattcagtaacagcagaatatacattcttctcaagttcacatggaatattcaccaagatatctcacattctggtaaataaaatacttcctagcaaatttaaaagactagagaatacaaaacatgttctcagatccagaattgataacagaaagatagcttgaaaacccacaaatatttggatattaaatcctgaacttctaaataatgcatggatgagaaaagtctcaagatattaaaaattattttgaattaaataaaaatagaacttatcaaaacacgtagaatgcagcaaaaggagtgcctggctgaaatgtagacgattgaacacatataccaccaaagaatgatctgtaatcaataatctcagtgtctaacttaaaaaactaataacaggccaggtatggtggctcacgcctgtaatcccagcgctttgggaggctgagtcaggcagatcacctgaggtcaggacttcgagaccagcctggccaacatggtgaaaccccatctctacaaatacaaaattacaaaaatactctctcatgtactctaaaatacaaaaattagccaggcatggtggcacaggcctataatcccagctacttgggaggctgaggcaggagaatcacttgaacccaggaggcagaggttgcagtgagcccagatcgcgccatcacactgcagcctgggtgacagagcgagactctgtctcaaaaaaaatagatagagaaaaaccaacaaaaccaaaaggtggtcttgtgaaaatatcaataattaactgaaaaatgtctcctcaagctagctaacaacaaaaagacaaagattgttaatatgacgaaagggggaaaatgaagaagcacttgacaaaattgaacatctatttatgatagcaaactaggaatagaagggaatttcttcttcttcttttttttttttttttttgagacaggtctcactaaattgcccaggctggagtatattggctattcagaggcgccgtcatagtgctatagcctcaaactggtgggctccagcaatcttcttgccttggccccgcaagcagcaaagactataggtgcatgccactgcatcgggcaagaggaacttcttgagaaagtacatacaagaaacctgcagttaacatcacgcttaatgtgaaaaactagatgttttcccagtaatatgaggaacaaggtaagaaagacccttctcacactctcaccattcatgtatgtatgtatgtatgtatgtatgtatgtatgtatgtatttatttatttatttatttagtgagagagtctcactctgtcacccaggctggagtgcactggcacgatctcggctcactgcaatctccgcctcctgggttcaagcaattctcctgcctcagcctccggagtagctgggattacaggcatgtgccaccacgccccgctaatttttttgtatttttagtagagacggggtttcaccatattgaccaggctggtctggaactcctgaccttgtgatacgcccgtctcagcctcccaaagtgctgggattacaggcatgagccaccatgcctggcctttttttttttttctttgagatggagtttcgctctgttgcccaggctggagtgcactggtgccatctcagctcactgtaaccacctccacctcccgggttcaagagattttcctgcctcagcctcctgagtagctgggattacaggtgcacccaaccatgtccagctaatttgtatatttttagtagagatggggtttcaccatgttggccaggctggtcctgaactcttgacctcaatgatccccccaacccctgcctcggcctcctaaagtgctggattacaggcatgagccaccgtgcctggcccctctcaccatttctattcaatattgtacaacagtgaaactaagaaaaagaaaaagaaataaaagatataccaactgggaaggaagaactaaagctgtctatctgcatatgacatgactgcgtatgtagagaatttcaaaaatctacaacaaagaaaattcctggaaccaataagagcaaggttgaaggacacaagctcaacatataaggccaactcctttcctacacagccacacaaatatagtcaactgatctttgatgaagaaccaaaggcagctgggtgtggtggctcacgcctgtaatcccagcactttgggaggctaagatggggtggatcacttcagcccaggagttcaagaccaatgtgggcaacataacaacactccatctctatttctttaaaaaaaaaaaaattttttttaaataaaagaaaaattaaatgaaaatagatcaaagatgtaactgtaaaatacaataagactcctagaggataatatataaaatctagatgaccttgggtttgatgatgaattataacataaattataagtttgacttcattaaaataaaaaagtcctgctctggggccgggcacggtggctcatgcctgtaatcccaactctttgggaggccgaggtgggcggatgacttgaggtcaggaatttgagaccagtctagccgacatggtgaaaccctgtctctactaaaaatacaaaaattagccaggtgtggtggtgcatgcctgtagtcccagctacttggcaggctgaggtagaataaatcgcttgaacctgagaagctgatgttgcagtgagccgagattacgccactgcactccagcctgactgacagagactccatccccgccgcccccccaaaaaagagtcctgctctgggaaagaccatgttaagaaaatgaaaagacaagctacagacagggagaaattctttgcaaaacacctatctgacaaaggactgatattccaactactaaaagaactattaaaactcagtaacaggaagacaatccaattaaaaatgggcaaaagatatgaacatacacatcaccagagaagatttagagatggtaaagcagcacatcaaaacatgctcaacgtcacacagcattagggaataaaaaaaaactaagataaataaaactgagtaagatattaccacactcactaaatggctaaattttaaaacactaaaaacaccaaatgatggtgaagatggagaacaataagtatcatcattatttgctgctggcaatggaaaatgatactcccactttgaaaggcagacagttacaaaaaaaaaaaaaacacactcttaaattgtaatctagccatcatgctcctaggtatttactaaaaagagttgaaaatttatgttcatgccaaaacctgcacatgaatgcttatagttttattcaaaaccttgcaaaccttagagtgaaccaagatacctctcaatagacaaatggataaaccatctggttcacctacagaatgataaaaagaaatcaggtatcagctgggcgcggtggctcacgcctgtaatcccagcactttgggaggccaaggagggcagaccatgaggtcaggagatcgagactatcctggccaacatggtgaaatcctgtctctactaaaaatacaaaaattagctgagtgtggtggcgcttgcctatcatctcagctactcgggaggctgaggcaggagaatcaggtatcaagccatgaaaagacatggaggctaggtatggtggctctcacctgtagtaccagctactcagggcactgaggcaggaggatcacttgagtctgggagttcaagaccagcatgggtgttatgatgagaccccatctcaatttaaaaaaaaaaaaaagacgtggagaaaccttgacttgaacatatattattaagtgaaagaagccaatctaaatggttatatactgtgtagtttcaaagatgacattcaggaaaaggcaaaattatgacagagtaaaaaggcttttgactgtcaagaatttgggaagagggagggactaatgaataggagaagcacaggggatatttaggtgagggaaagcatcctacatgatgcagctatgatgaatagcagttattatacatttgccaaaacccacagattgtataacagagtcagccctaatgtaaactgtggactctgaggcatcaatattggtacatcacttataacagatgtattaaagtaatagaaaatataaaaaggataaactatgtggaggcagagggatcaagtgggaacactacactttctcatcaatttttctgtaactctgaaatagctctacaaaaataaagtctactagaaaaagaaaaacgatgaggacaggctaatgacaattcacaccatgactggttgatgaatgaaacatacaacctttcactcaattcatgaattttattttagtaagcctttatggtgcttcgtgagccagagactggtaaaggcaatgaaagttccacaggatgccttgttcaaaagcccatcactctctattttgagaagtgaaataagagctttgattagtatcagtagtgtccggaactcttgcacgaatatgagtgtccaggcggagccttggattgtgggattaccctctgtagaggtgtgtattatcttgacttatatggctagccgtgaggtaaaaaaagattcccagagttttgtgggtttttttttttttccctttgagatgaagtctcgctctgttgcccaggctgaaatgcagaggcgcaatctcggctcactgcaacctccgcctcccaggttcaagcgattctcctgcctcagcctcctgagtagctgggattacaggcacgagccaccacacctggctaatttttttgtatttttagtagagacggggtttctccatgttggccaggctggtctcgaactcctgacctcaagtgatccacccgcctcagcctcccaaaatgctgcaattacaggcgtgagccaccacacccagcctaatattcccagagttcttttactacaaaggtgcaactcttagacaatcactcaagagtgtgtaaacatgtgcagatgggatttattgttggccactgctaagatgactaactgatgaactgccccttgaatctagtcctttattaggtccatttcaattaagggataaaaagcagcagctccaacatgtacaaatgtggccatgtcagccatcaagtctacacactcgccactgctgttcactcagtagcaaaggatctaggagaaggtagacctcctccagcaccatgacatctggcaaggaagaaagaaaagaagtcaccctcccaccccaactcctgcagagaggatatgctgaaggctaacatttgactctgtaattttgaaaggaggtctgtgtaggttgctgtttctaggacccatggcaaaatgagcagttgagtagagtcacatgcccagggcccaggagagcctcaatgttcaggataacctagtacaaggtgatcattgcagctctaatggcatatagtgtggggccaagggctgtttcttgcatcagagccctatggacaacttatggtcatcatggataattacaagaggcatgagaggaggtttctaaagccactatagtggccaggaatggtggctcatgcctgtaatcccagcactttgggaggccatggcaggcagatcactggaggtcaggagtttgagaccagcctggccaatacggtaaaaccccgtctctactaaaaatacaaaaattaactgggtgtggtggtgcacacctgtaatcccagctactctggaggctgaggtaggagaattgcttgaaccagggaggcagaggttgcagtgagccgagattttgctactgcactccaacctgggagacagagcaagactccatctcaaaaaaaaaaaaagaaaagaaaagaaaaaaagagcatctatagtgctctggaggcactaacaggagtgcctgccatatggcaacttaaacagtgtctagagcctctgtggtagcgatatccgggcaatgatgaccaatttgcaagtcacagcataaatgggcttaagtaaactttataaaggactgtgttacctcctgaacatcaaaaaagcccaaatgatgttgtgggtgccaacaggaacaacagcagtaggcagaggttgcagtgagctgagatcacaccactgcacttctgcctgggcgacagagtgagagtctgtctcagcactcccacctgggcaacagaggaagaagactccatcaatccatccatcaatcaatcagtgtaccttgcttacatttagtgggatctccagatatagctgattcctaggattgattaatcccatgaatgattgtcagttagtgcattacagagatgttaaaattaattcagaactaggctgggcctggtggcttattcctgtaatcccagcaccttgggaggccaaggcaggaggattgctagagcccaggagtttgaaaccagaaatatatatatatgatttaaaaaataataaaattcagaactaatgtcggagaggcctgaaagccaagcacatgcagtgtccttttctctctctttttttttttgagaccgagtttcgctcttgttgtccctgctggagtgcaagggtgtgatctcggctcaccacaacctccgcctcccgggttcaagaaattctcctgctccctagtagctgggattacagccatgcaccaccatgcccagttaattttgtatttttagtagagaagggggtttctccatgttggtcagctcccgacccgcctgtcttagcctcccaaagtgtttggataacaggtgtgggccaccatgtccagccttttttttagttgcataattcttttactatattttggagttgcaattaggtcaaaacctagaaaaatgcttcatttttttttcttttgtgcccttccttctttaatctttctctgttttgtttctgtggtcacttgatatgcttccggttatcttcctaccttaatatttattaatatatttttttcctccagaaaacctcaaattgtaggttatgggcctcacccatggaactggtggcattaaaaggtttcagggctgggtgtggcgactcacacctgcaatcccagcactttgggaggctgaggcaggtggatcacctgaggtcaggagtttgagaccagcctggccaacctggcgaaaccccatctctactaaaaatacaaaaatcagccgagtgtgttggcaggtgactgtaatcccagttacgcaggaggctgaggcagggagaattgcttgaacctgggaggcagaggttgcagtgagccaagatcatgccactgcactccagcctgagcaaaagagcaagactctgtcaaaagaaaaaaagaaaaagaaaaaaaggtgatttgggccagcgcagcagctcacacctgtaatcccagcacttcagaaggctgaggcaggcagatcacttgaggccaggagttcgagaacagcctggtcaataagatgcaatcccatctctactaaaaatacaaaaatgggccgggtgtggtggcacacgcctgtaataccagctactcaggaggctgaggcataagagttgcttcaacctgggaggcaggggttgcagtgaactgagatggtgtcactgcactccagtctgggcgacagagaaagactccgtctcaaaaaaaaaaaaaaaagtgatttgatcaaggaatccaagggaaagaaacgcaaatgttttaatctgtttagataaggaattgcttctccaccgttaaaatggaaaactcacaatcgaaaggtaaatacattcacaagggccaggcatggtcacgcctataataccaacattttgggaggccaaggcaagaggatcccttaaagccaggcgttcaagactagcatgagcaacacagcaagaccctgtatctacaaaataaaaatttgaaattagccagtagtggcagatgcctttagtcccagctactcaggaggctgaggcgggaggatcgcttgagatgcagtgaggtttgatggcgccaccgcacttcagcctgggcgacactgcgagaccgtgtcaaaaacaaacaaattcccaaacttgagagcggtagcccagacagtgggtcagtgcctggtgatgacagcaggggcatctgagcagccacaggaacgaactctgggagctccacacgccctcctctcccctagctgcaaaaaaaatgttccctcctccaggcttcaattctcacaggtggattcaccttaatgttctgacccaaatggattctcaaacacacgagaatccgtcatgactttcccgtggcccctgcacaatcttcggagacgcggggctgggggcgcccagctgcccggaaagggctccggggccggggccgcaatcgcagggacgggacagaacgcctgaggtcccagctgccggcccagccccacgctgctgggagaccctcgggtcagctgcgccagggggactcgggtcttcccatagccggttccgacaagtcccctcctcaggtctcgggactcccggccccgcacactcaccatttctcggcttacggaggctccaggagtcctccctacggatccctcactacctgcaggtcccagtgagacaaagcatacgcagagccacagacagtccgaggctgggacgcaatcctagcgaaccgctagaataaggatgttcacacgcgcattcagagctagggtgcaagcgccttttcaacaccgatgctgactggacagtttgtgtgcccccgccccctgacccctgagtgacagccatgcaggagggcacgtggttgagccgagctagcttcccagagtgggttttcccggcggggatatttgcatgtaagaggaatttgttctttgcccgaggtccatttttaagtggcctattcagtagtgttaagtgtagttacattgtgaaaccaatctctagaactgatttaatcttgcaaatttgaaactctttattgattgaataacatcccatttaccgctcaccctcagcccctgacacctactattcgactttttgattgtgtgaatttcactgtgggtacctcatataggtggaattattctgtatttgtccttttccgactgacttatttcacttagcataatgtcctcaatcttcctgatgttgtagcatgtgtcagaatttacttccttttaagacatttaaaggccaggcacgttggctcaagcctgtaatctcagcacttcgggaggatcccttgaggccaggattttcacaccagcctgggtaacactgtaagaacccgcctctacaaaattaaaaattaaaaattaagaaatatagattccggccgggtgcggaggctctcgcttgtaatcccagcactttgggaggccgaggcgggcggatcacgaggtcaagtgatcgagaccatcctggccaacatggtcaaaccctgtctctactaaaaatacaaaaattagctgggcgtggtggcacgcgcctgtaatcccagctactcaggaggctgaggcaggagaatcacttgaacctgggaggcggaggttgcagtgagccaagatcgcgccactgcactccagcctggtggcagagcgagactctgtctcaaaaaaaacaacaattaaaaaaaatagctattgcaacagaagctactcaggattttaagaaaaagtgtggtttagacacttagaaatgtctttgggaaaaaaaattgttaagtgcactgtaaaagcatcacatgatctagcctcataataattctcccctttttttttggaggcagagtttctctcttgttgcccaggctggagtgcagtggcgtgatctccgctcaccgcaacctccgcctcccgggttcaagcgattctcccgcctcagcctcccgagtagctggaattacaggcatgagccaccacgcccggctaattttgtatttttagtagacacggggtttctccatgttggtcaggctggtctcgaactcccaaccttaggttgggatctgcccgcctcggcctcccaaagtgctgggattacaggcctgaaccaccatgcccgtcaataattctccctttttaaaacccaggattctgccgggcgcggtggctcatgcctgtaatcccagcactttgggaggctgaggcaggcggatcatgaggtcaggagttcgagaccagcctggccaacacagtgaaaccccatctctactaaaaatacaaaaattagctaggcatggtggcgcgcacctgtagtcccagctactagggaggctgaggcaggaaaatagcttgaacctgggaggcagaggttgcggtgagccgagactgcatcactgcactccagcctgggcaacagagcgagactccatctcaaaaaaaaaaaaaaattagctgggtgtggtggcggggtgcctgtgatcccagctattctggaggctgaggcaggagaatcgcttgaacctgggcagtgacccaagatcacgccactgcactccagcctgggcaacagagcaagactctgtctcaaaaaaaaaaaaaaaaaaaaaaagaaagaaagaaaagaaaaaaaaagagacataaagaaagttataaaaataaataagtatttttggttaaaaaaagcataaagaaaagatattttatataaaaaaggatcttgtatgatagattcttgtcctaaagaaaaatgactggttgtttaaaaagagggatgtttaggacaagtcagaaagtcaaggcatatcatagagtgtaagtcatgaaagaatttatgaaagggaacttatggaagaaatgttgtagaatttaaaggtgtttaggcctcctgaatgcttcataaaatgccattatgactcttaactgtacaactgcctgctttacagctagggaaggcctgggacacaagaagttagatgctagaatgagtcagaccttatctgcacttctgtctaggtcctaggctccccacctggtccataattaaaatcacttaccaggtttttcaccaaaagtaaaagttgctaagaatcaatattgtaacatgtaattgagactactggaaaaaacagttttacatgcaaggtgtgtaaggaaagtagagtatacttttggtaaaaagattataagaaggcatgggaatgtggattttttttgcctaaataaaaggttaatggattaaattagataaaataaagctgaaagtttaagcaagttgtggaaggttgattgtaaaagaaattctgtgtgtaaacatattggctaaagttaaagggggtattatccagtttttctgtaaattgaatattaaaataaaagcacaacggctttcttttagaacactaacctgctctttaacaaaaattgtaaagggtaataaaaaatctataaaaattgccaaacattggcgtaaatatgtctataaaattgggtaaatatgtctataaggttttattaagaattgggtttaggccaggcgccgtggctcacgcctgtaatcccagcactttgggaggccgaggcgggcagatcacgaggttaggagatcgagaccatcctggctaacatggtgaaaccccgtctctactaaaaaaaaaacacaaaaaattagccaggcatggtggcgggcacctgtagtcccagctactcgggaggctgaggcaggagaatggtgtgaacccaggaggtggaagttgcagtgagccgagatgtgccactgcactccagcctgagcgaaagagcgagactctgtctcaaaaaaaaaaagaaaagaaaagaattgggtttaacagtaatagtatactaatgtaaatgtgaaatttggcttatttggtacaaaaatcatagaggaagcaaagtcaaatataaaatggagtatggctttctttggactatatctgtatatatatgttattggtatgtgttccaaaatgatggaaaactcttgtaattctgatatatcagtgtatgttatcagtaataattataattattatgttaaattattgtgtgccacagagtaacagatttccttgtcaattgtgtctttagctatggctaccctaaaactttgtcatccataaataattgttgtcttgtcttggtcctctttagaaggtggttttataatcagctataaagctctaacaggtgctcttgaatgcaagttttagataactttggagattgtgacatcagaatagagaaaaaatgttcaggactcttgtcctagcactttgggaagccaaggtgggtggatcacttaagcccaggagttccagaccagcctggccaacatgacacaacctgtctctccaaaaaatacaaaaattagccaggtgtggtggtgcacgcctgtagccccagctacttgggaggctgaggtgggaggatcctttgagcctggaaggcagagactgcagtgagctgaggctcacagctttccagtcagggagacagggtaagaccctgtctcaaaaaaaaaagaaaaaaaaaaggccaggtgcgttggcttacgcctgtaatcccagcactttcggaggccaaggcgggtagatcacgaggtcaggagatcgagaccatcctggctaacacggtgaaactccgtctctactaaaaatacaaaaaattagccaggcgtggtggcgggcacctgtagtcccagctactcgggaggctgaggcaggagaatggtgtgaacccgggaggcgaaggttgcaatgagccgatattgcgccattgcactctagcctgggtgacagagcaagactccgtctgaaaaaaaaaaaacaaaaacaaagaattggggtctcactctgtcacccaggctagactagagtggtacaatcatagctcactgcagccaaaactcccaggctccagcaatcctcctccctcagccatcaagcagctgggactacaggtgtatgccacaaacctggctaatttttttttataagatatgaggttgcactatattgcccaggctggtcttgaactccaggactcagatgatcatgccactgtgctcggcccaattttattattttttgtatgtctatccaactgtcacaacaccaatttatgaaaataatattctaggccaggtgcggtggcataggcctgtaatcccagcactttgggaggccaaggcgggcggatcacgaggtcaggagatcgagaccatcctggctaacatggtgaaaccctgtctctactaaaaatacaaaaaaaattagccgggcttggtggcaggctcctgtagtcccagctactcaggaggctgaggcaggagaatggcgtgaacccgggaggcggagcttgcagtgagccgagatcgcaccactgcactccagcctgggcgagagagcaagactctgactcaacaaaaaaaaaagaaaaaagtaaaaaaagaaaataatattatttcccgattcctggcaccgtttttgaaactcagttcactatatacacacacacacacacacacacacacacacacacacacacacacacacatatatgggcctatttctggaatttcaatttcatgccattgatctctatgtctgaattgcctcatgtatttgatatgaaaattttgctgctactggagactgggtgacataaattaaattgtatatcagaaaacctttggctggcgcggtagctcccgcctgtaatcccagcactgcgggaggccgaggcaggaggattacctgaggtcaggaacttgagaccagcctggccaacagggtgaaaccccatctctaccaaaaaaataaaaataattagttgggcatggtggcaggcacctgtagtcccaactatgtaggaagctgaggcaggagaatcacttaaacccaggagacaaaggttgcagcgagccgagatgatgccactggactccaacctgggcaatagagcaagactctgtctcaaaaaaagaaaaccactgaggtcttcctagagggtaatggtcatctacacagtgcagcccatcatgtatatttctttttttttttttttgtcgagacaaggtttcactatggttatgcaggctagagtacagtggtgtgatctcggcttactgcagccttgacctcccaggctcagatgattctctcacctcagcctcccgagaagctgggcctacaggtgcgcaccaccacgccgggctagttttttgtatttttagtagaaacaaggtttcgccatgttggccaggctggtctcaaactcctgggctcatgcaatccacctgcctcagcctcccagagtgctgggattacaggtgtgagccaccacacctggccccatcatgggtttttcttatgtgcagagtacttattcaaatccacagtgatttcccagttgacacacagacaagaactatggattcttagagaatatccaagttataattgaatcaaactgcagagagagggtatcattttgagtaccaccccccagtttggtggaaaagaaagttgtgatattgtgaaatatataatttgggttttgtccagggttcctggctcacagttgctaaaaaccttgtaatttcctaagcgactagagcaattggagtatcttttgttaaaatatttgggctgcctgtaatcccaccatgttgggaggctgaggcaggcaggatgcttgagcccaggagttcaagaccagcctgggcaacacagtgagatcctatctctacaaaaaatacaaaaattggccaggcataggggtgtgtgcctatagtctcagctacttgagaggttgaggtgggagggtcacctgagctcagggaagtcaaggctgcagtgagctgtgatgacaccactgcactccagcctaggtgacagagtaagactctgtctcaaaaaacaaacaacaaaaaaaaggctgggcgctggggctcacatctgtaatcccagtactttgggaggccaaggtaggtggatgcttgagctcaggtgtttgagaccagtctgggcaacatggcgaaaacccatctctactaaaaatagaaaaaaatagccagatgtggtggcgtgcacctgtagtcccagctactcaggaggctgtggtgggatcattgcttgaacccgggggtggaggctgcattgagccaagattgtgccactgtcactgggtgacagagtgaaggagaccctatctcaaaaaaaaaaaaaaatggccttttgtattcagttcttaaaatagctctagaagagttccagagtgacaggtggaagaaatgtctttagttattcataaccatcccctttccaccacagctaagtttatgttaatggggtgatttttggaaagctcctacaaaccacaggatgtgaggctagttgccagggaaccaaccatgtgactggagctttgaaactttcagctctgtccccacctccagggagggaagagaaaactgaaggttgagttgatcacccatagtgaatgatgtgattaatcatgtcaccataataaagccaccataaaaacccaaaaacacggctcagagagccttctggttggtaaataagaacataaccatatgcctggaggtatctcttcatctggctgttcattcgtatcatttaaaatatcctttgtagggccaggtgtggtggctcacgcctgtaatcccagcactttgggaggctgaggcaggtggatcacttgaggtcaggagttcaagaccagcttgaccaacatgatgaaaccccatctctacttaaaatacaaaaattaggccaggtgcagtggctcacacctataatcccagcactttgggaggacaaggtgggcggatcatgaggtcaggagttcgagaccagcctggccagcatggtgaaaccctgcctctactaaaaacatagacacacagaaaaaaaattagctgggcatggtggcatgggcctgtaatccagctacttgagagactgaggtaggagaatcacttgaccctggtaggcagaggctgcagtgagccaagattgtgccactgcactccagcctgggcaaaagagtgagactctatctcaaaaaaaaaaaaattagccaggcgtggtggtgggcgcctgtaatcccagctacttgggaagctgaggcaggagaattgcttgaacctgggaggcagaggttgcagtgagctgagatcgcgccattgcactccagcctgggcgacaagagcaaaactccgtctcaaaaaaaaaataataataataataaataaaataaaatatcctttgtaggctgggtgcagtggttcacacctgtaatgccagcactttgggaggccaaggcagatggatcacttgaggtcaggagttcgagaccagcctggccaacatggtgaaaccccttctctactaaaaatacaaaaatagctgggcgtggtggaggatgcctgtcattccagctactcgggaggctgaaacacgagaatcatttgaaccctggagatggaggttgcagtgagccaagatcgtgctgctacactccagcctggcaacagagtgagaccctgtctcaaaataaagagtaaacaaataaataaataataaaatatcctttgtaagactaggcacagtgactcactcctataatctcagtgctttgagaggagcgaggtgggaggatctcttgagacctggaggttgagactagcctggacaacagagcgagaccctaactttacaaaaaataaataattagttgagtgtggtggcacatgcctatattcctagctacttgcggggctgatgagggaggatcgcttgatcccaagagttgaaggctgcaatgagctatgatcctgccactgcactccagcctgggagacagagtgaaaccctgctctattaaaaaaaaaaaaaacactttgtaataaatgggtgaatgtaagtaaagtgtttctgtgagttctgtaggctgctacagcaaattaatcaaacccaaagagtgggtcatgaaaaccctgatttacagcttgttggtcagaagcataggtcacatcctgggacttacaactgacatttgcagtgaggggcattcttgtgagccgttagcttttggtattggactccgtctccaggtagatactgtcacaattaaattgaattatatagcacacccagctggtgtctgcttgagaagtggttattggtggaccagaagtgaagtattctgttaaatattttgttaatggttttcctatccctttaagaaaagtgtatttgagaccctcgaataggatttttttttaatttaatttttttttttgagacagagttttgctcttgttgcccaggctggcgtgcaatgatcttggctcaccgcaacctccacctcccgggttcaagcaattatcctgcctcagcctcccaagtagctgggattacaggcatgtgccaccacgtcccgctaattttgtatttttagtagaaacagggtttctccatgttggtcaggctggtctcaaactcccgacctcaggtgatccacccacctcggcctcccaaagtgcagggattacaggcatgagccaccgcgcctggcctaaaataggattttttttttttttcattttagagacagagactcactctattgcccaagctggagtgcagtggcacaatcataggtcattgtagcctccaactcttggactcaagggatctctgctatgggactacaggcacatgccaccaccctgggtaattctttttttttttttttttttgagacagggtctctatctgttgcccaggctagagtgcagtggcatgatctcagctcactgcaacctctgcctcctgagttcaagcaattcttctgcctcagcctgctgagtagctgggactacaggtgtgcaccaccatgccccgctaattttttgtattttagtagagatgcggtttcgccatgttggccaggctggtcttgaactcctgacctcaagtgatttacccacctcagcctcccaaagtgctaggattacaggtgtgagccactgcacctggccaattttttttatttttatagagacaggatttcactctgttgcccaggctttgatgtccttttataaaaggaatcactggaagatttttattttaatgatcagcaaaggcctaaaagtccatgaccattcacaagtatcatttccatatggtagatttccagcacatgttaggaaagaaaaaaaatgaacagctttgtgttttactaaagaacaaataaaatcccatttttattcaatatttcaataatttatgtttgcacatcactgtggtgactaatgtgatttcataatcattagtatttcatttgattagccccacccaatcatacctcccatcttgcaaatgaaaaaagttaagtatggagagcacaaagtcttgtctaaactcatatggctcataagtaataatgaaattggccaggtgtggtagctcacgcctaccatcccaacactgggaggctgatgtgggaggatcacttgagtccaggagttcaagatcagcctgggcaacatagcaggaccctgtctctaaaatttaaaaaatttaaatttttttttttttttgaggtggagtctcactctgtcacccaggctagagtgcagtggcatgatctcggctcactgcaacctccaccttctgggttcaagcaattctcctgcctcagcctcccaaatagctgggattacagatgtgcacaaccacacctggctaaaaaaagaatttttttaaaattagccaagcgtggtggcgcacacctagtcctagttccagctactagtcccagctactagggagcctgtgaagttgagtctacagtgagctgtgatcttgccactgcactccagcctgggtgacagaacataatagtaatagtaatacaatataataacagtaataataatggaacttctcagtattaaagtccaaatgtgtgccaccacatatactgagcactgtcaaaaactgaaaactcaggccaggcatagtgactcacacctgtaatccctgcactttgggaggttgaggcaggagaattgcttgaagccaggagcttgagaccagcctgggcaacacagcaagatccctgtctcaaaaaaaaaaaaaaggaacaaacaagaacagcatagcatctgcagacagagaagcagcagcaaatcagtggaggccaggattgatagcttccccatttcgggttttggtagacaggaaggacggtgacccagacactgaaaaataccagcatgctgaacttaaggattggcttattgaaaatgtcaggcaagttcctggccagaaaagccacattgaagctcccatgagccaaggaacccaggattcacagaacagtcaataaccaaatcgtggttttatgtgaagatgacatattcaggctcagattatgtatccacatgcatgaaggctgtagtcattccccatgaaattcctcccacttcagcatcccaaagtgttgggattacagagtcacttagatcagggaactgatagcaatgacaaaattaggtacccccgacactaacccgtgccttatccgtctcttgcatgtttaccttgaaggtcagaactgcagtgatcgttttgtccaaactatgcaaacaagtaaacatgactccaaatttgtggtttttgtgtttttttgagacagggtctcgctctgttgcccaggctagagtgcagtggcaccatcacaggtcaccgcagcctcaggttgaagccatcctcccgtctcagcctcccgaggacctgggactatgccaccatgcccagctaattttttatctttatttatttatgtatttatttatttatttatttatttatttttgagacagagtttcactctgttgcccaggctggagtacagtggcgcgatctcagctcactgcaacctcctcctcccagattcaagtgattctcatgcctcagccacccaagtagctgagattacaggtgtgcctcccaccatgcccagctaacttaaaaaatatttttaatagagatgaggtttcagcatgttggccaggttggaaaccaactcctggcctcaagtgatccacccaccttgcctcccaaagtgctgagattacaggcatgagctactacacccagccattttttttattttttgtagagacagagtctcactacattgcccacactggtctcaaactcctgaactcaagcaatcctcctacctcagtctcccaaagtgccaggattacaggcatgagccactgcacccagcccaaatgtgatattccaaaggatgcaggtggctgtgttgggatggccaatgaaggtaagggacaatggaagtacagggtgagggcaatgaacaggacatacctgagagcctggttattggccttgactatgggagtgccttcacaaagacccgaaagacccccccacaaagaggtcatagaaggacagacccaaatggtcattataaacaaggaaggtagccacgctgacaggtagcgatctcacttacagtttgagtcttgatgctttgtccatggtgttcactgttctgcatctaattagaaacaagaggatgcattttgtgagtttcagcaatttagaactaaacatgacctttgacagccttggaagcattgttccccctgcatctacctgtacacacagagctaccagaagggtggatcatgggagttttcaagattacactgtctcctctataatgggaaaaatgaaatatgtttctactttaaaaaaaaaatttagagacagtctctctctctcccaggctggaatgcagtggcacaatcttggctcactgtaacctcaaactcttagccttgagatccttctgcctcagcctccgaaggagctaggactacaggtgaacaccatacccagctaatttttaaaaattttttgagaaatggggtctcgctatgttgcccaggctggttttgggctcttggtctttccaagttctgtagggacactttagaaaacttatttgagataaatttccttccactttacagcaacacggatggaactggaggccattatcctaagtgcgatgatgcaaaaacagaaagtcaaaaactgcatcttcttacatataagtgggagctaaacaatgggtaaacatggacatacagaatggaataatagacactggagatgccaataggttggacagagaggggggatgagggatgaaatattacctattgggtacaatatacactctttgggtgatgggtgcactaaaagccagacttcgccactatgaaatatatccacgtaacacaagtgcatttgtaaccataaatctacaaaaataaaaataaaaatgaaaagcaataaaaacatgcttaaactaaaaacaaacaaacaaaaaaacaacgaaaacaaaccatttccttccagagtaaaacgcagtttactgagcacgtctcatagatcgtgattggtctgaagagtccctgtgcccaggttagggttgcaatttaccacccgagccaagtgctcgggtgtcctacggattgttttttctttctttcctttttttttttttcttgggatgggttctggccatgttgcccagactgaactcaaactcctggagtcaagcgatccacccgcctcagcccacccaccccccgacctcccccaccgcccccaccacgcagtagctgggactacgggtgtgcgccaccaagccctgccttggggttccttttctaaagtgccaaatgtgtggaggtggggaaaagaaaggtggacgcctcaacgctgttatggtcaaagattaaaatgcaaccacactttttattacacatgatggggtaaccgtctgtttataaacaagggtcactattccacgagaggccttacaacattatgccaagcccctggtacctggaggacatcagaccctcctgttcctgtgcggccttgactagacgaccacttgctctggacttgctcctcgaggggtcgctccatctggaaactgagactggaattcctgcgcatccctgtccccgcatccagaaacactgcaggaagacttccgtgtccgacccgagatccggaacaatttctgcttcaacacaattgtccacggagggcaccagttccgtcccaccggcggaagcgagatctgcctagctactagacctgctgcctagctgtcattcggacaaaaaggggcggggctgtataattgtccaatcaggggcggcgccggaaaggagggtacggctacgctgcgcaaatgcgtgctacgtcactgtgcgatcgggttgtgcttagcttggggtctcctggccccttgacgcgtcaggttgctgtacccctgcatcggatgcgctgtaccctgcgctggctccgtgaaccttagggacaacaccgggacacccgcgaggccggaaaatggtgagtgtgcagggccggactagttggaaccggccgtgatcgcgggacccgggcctccccacggtcacctccggccgcagtgtggggctgggctggcagctggaactccaagcgtcctgtcccgtccctgcgcggcgactgcggtcccagccccggagccctctctggacaactccgcgcccgcagccccgcgtctttcccagatcgtgcagggaccacgggagggtcctggggagaatcccgccttgtgtgtttggtttgtgtgggaggagctacagtctggggttcccagtcccttctttcttcccaaaggctgtttccccctgagtcttccaaagatgttggaagcagagtctcaaatccactaccctgtccccccagcctagctcctcccacggcgggccattaatccctagatttccggatccctccccgaattcccaaacgcctacttccgctcgccagtggaaaacatcgtcaccaactctttgtcctgtgtggtgcatttcaaacacacgcagtattttaataatcttttttccaatagatgcctcttttaaacgatttatttcttgtttgtggatattttacatcagagaaaaatcagaaaaattattcacttggaactaatctgcataaaatgctgtggccctcatcctggtacctttccagggcacagacatcctatgggaactcctttgcgttgaggttcctttttgtaaactttcctgggtaatctatcttttcagcacagtttcagattggcactgtcccgccttgggtttatgaccttgaaaagatttattcactcgaatgtcatttttccaataaatataaaatatatgttatcagaagaacttgagagacagtacaaaatatttccaaagggcaaaaaagaaatgaatctcagaaaacaaaaaacatcccaatattacatttgttaaaaattctttgttctttccctgagcacatggaatatgtttctcaggtctgttcttttagtttgatgtttcagatggtattccaggacttaaacttgcaacatctagaagcattcagatagaagtaatacttttgtaaactatttattgccatggaaataattaactgacattattattttcttttttttttttttaacagatggggtctggctgtgttgctcaggctgatcttgaactcctgggctcaagcgatcctccaccctcagcatcccaaagtgctaggattccaggcatgagctactattaccggcccaacattctcattttctgaaagcaatagtgggttttcttgttaaatggcttaaaattttcttgcttccttcctttatttatttatttatttatttatttattatttatttacttttttttttgagacggagtctagctttctcgccaggctggagtgcagtgacacgatctcagctcactgcaacctctgcctctcgggttcaagcgattctcctgcctcaacctcccaagtagctgggattacaggcacaagctaccacgcccagctaatttttgtattttttttttttttttttagtagagagtgtttcactatgtttcccaggatggtctcaatctcctgatctcctgacctcatgatcctcccgccttggcctcccaaaatgctgggattacaggcatgagccaccacgccaggccttttgcttcctttatacgtaaacactgtgtttaagtaattctgctggatttttttttttttttttttttttaaagaccaagtcttgctcttttgcccaggctggagtgcagtggcacaattttggcttactgcaacctccgcacttggaagctgaggagccacaggcagatgctgttaggggaagaggggaggatgtctgaggttttaattgtggtttccttgggtgtgtttttagacattacatttgagtttcacatctgtaaggtaggtacactgagtgtaattggtgcatattgacagccattctcctgccttagcctcccaagtacctgggattacaggcacacaccactatgcccggctaatttttttgtattttgagtagaggcggggtttcaccatgttggccagtccggtctcgaactccggaccgcaggtgatccacccgcctcagcctcccaaagtgctgggattataggtgtgagccatcgtgccaggccttctgctggatgtttaaggaacaatccttaagaatttaagggcccggcacggtggctcatgcctgtaatcccagcactttgggaggccaaggagggcggatcacgaggtcaggagctcgagaccatcctggctaacattgtgaaaccccgtctctactaaaaatacaaaaaattagctgggcgtggaggcgggcgcctgtagtcccagctactctggaggctgaggcaggagaatggcgtggacctgggaggcggagcttgcagtgagccgagatcgcgccactgcactccagcgtgggtgacagggtgagactccatctcaaaacaaaaaaaaaatttaattaaattgtctcatttaaaattactagtagtgttccagagccttgtgactggggagcagaggcctgagataagtgattccaagctaagtccacctttgagcctgcaaagaaagatcattgaaggcccaattggttcttcctggggagcctcccctacaggtctgccagctactcatatgcccaccatggaaggatcctcttgtactgaaagaaactgcagagcacttggaagctgaggatgcacaggcagatgctgttaggggaagaggggaggatgtctgaggttttaattgtggtttccttgggtgtgtttttagacattacgttttgagtttcacttccgtaatataggtgtactgggtgtaattggtgcatattgacagtgtctgtgaaggtcaggacttatgtttcctagagacagggttaatgaattggggagctcatttgcatcagaacctcaatctcaatctggttgagagtttcctcacttgggaaaacggaaacctagggaagctaatgtttctttgctgccataggagagaaggaggtgtggagctcccatagttccttgctgatcaggtgcttctatcctccattaccaggtactgacccactctaggggttacatttttctttatttttattttttttgagaccgagtctcactctgttgcccaggctggagtgcagtggcacgatctcggctcactgcaacctccgcctcctgggttcaagccattctcctgcctcagcctccagagtagctaggattacaggtgtgtgccaccaggcccggccaatttattttgtatttttagtagagacggggtttcaccgtgttgaccaggctggtctcaaattcctgacctcaggtgatctgcctgccttggcctcacaaagtgctgagattacaggtgtgagccaccacgccaggccggggttacgtttttcaagctgggagagtctgggtccaagctggggaatatgtttaactttttttttttttttttggaaacggagttttgctcttgttgcccaggctggagtgcaatggcacaatctcggctcaccgcaacctccgcttcccaggttcaagcgattcttctgcctcagcctcccaggtagctgggattacaggcgtgcgccaccatgcccagctaattttgtatttttagtagagatggggtttctccatgtttgtcagtctggtcttgagctccccacctaggtgatctgcccaccttggcctcccagagggctgggattacaggtgtgagccactgcgtccggcctttttttttttttttttttttttttttttttttttgatacagcgtctcactctgttgcccaagctggtctggaactcctggcctcaggccgtcctcccaccttagtctcctatgttcaactttttttttttttttttttttttttgagacagggtcccactccgtcgcccaggctggagtgcagtgatgtgatcattgctcactgcagcctccacctcctgggctcaagtgatcctcctgcctcctctgagtagctgggactgcatgcatgcaccacaatgcccatctaattttcgtattttctgtagagatggggtttcgccatattgcccaggctggtctggaactcctgggctcgagcacttctcccgccctggcctcccacagcgcatggcctcccacaatttcttgacatccaaagatacttttgctgtcttaaggttttatattttccagaatgtaatacacgtggagttattcaggatatagccttcacagattggcttccttcactgagcaatgtacttttaaggtccttctgtgtcttcatggcttgatacctgatttctcttatcgttgaacaatatttcatcataagattgtaccggccgggcacgatggctcatgcctgtaatcccagctctttgggaggccgaggcgggcggatcacaaggtcaggagtttgagaccagcctggccaacatgacaaaaccccgtctctactaaaaatacaaaaattagctgggtgtggtggcgcacacctgtaatctcagctacctgggaggctgaggcaggagaattgcttgaacctggaaggtggaggttgcagtgagccgagatagtgccattgcactccagcctgggcaacaagagcaagactccgtctcaaaaaaaaaaaaaaaaaaaagattgtaccacagattgtttatccataaacctgttgcatgatgtcttggttaagtcttaaatttggcagttatgaagaaacctcctgtaaatattcatgggcaggtttttgtatgaacagtatttttcaactcatgtgagtaaatagcaaggaatgtgattgcatggtccactggtaagaggacgttttgttttgttagaaactgcctatcttccaaagtagacataccattttccatttccattggcaaggaatgagaattcttgttgtctacatctttgctatccattgctgttctcagcattttgaactttgtacgttctaataagtgtaaagtgatatctcttcagttttatttgcagctccttagtgacatataattgagcatctcttcatatgtgtatttgccatctgtatatctttcattggtgaggggtgtgttcaggtcttttgctcatttttcactggttcatttgtcttatttttgttgagatttaagagttcgaattggaggcaggcatggtggtacacgcttgtcatcccagctactccagaggctaaagtgggaggattgcctgcacccaggattataagcccagcatgggcaacataatggatcctatctcaaaaaaacaaaaaggacgctaggcatggtagctcatgtggggccacccaggctgctggggagcagagctgagaagtggtgctggggctggagctgccaagggatcggagaaaaaaaattagcccaatgtgggtggcacacccctgtagtcccagctatttgggaggctgaggcatgagaatcgcttgagcctaggaggcagaggttgcagtgagccgagattgcaccactgcactccaccctgggcaacagagcaagactgtctcaaaaaaaaagaaaaacaaaaagaattctttggatattttagatactagtccttaatcagataagtgcttttgtgaagatttgcaaaaatctgtctgtgccttttatttttattcttttaacactttctttcacagagtaggagtttttcattttaatgaagtgaaacttattttttcctttcatagattgtgcttttagtggtttatctaaaaattcatcaccaaagccaagtggatagttttgcatgttacatttacatctatgatcgatttgggcttaatttttgtgaaaggtgtaagatccatgtataaattttttgtgggtgtatgagagtttaatagtataaatttcacttaggtactatttttgttgcattccacaaattttgataagttctattttcatttaattcacatttaatttttcttttttcttcttttttttttttttttgagacggagtcttgctgtgtcactcaggctggagtgcagtggtgcagtcttggctcactgcatcctccgcctcccgggttcaagcgattctcctgcctcaacctctcaagtagctgggattacaggcacgtgccaccatgcctgtctaatttttttatttttagtagagatggggtttcaccatgttggccaggctggtctcgaactcctgacctcgtgatccgcccaccttggccccccagagtgctgggattacaggcatgagtcactgcgcccggcccaaatttaatttttcttgagatttttttgattcatgtttagaactgtgttgggttttatttccaaatatttgatggttttctaactattcttctgttactgatttctagattaataccatggtggtctgagagcatattttatataatgtatattctttgaaaattgttaaggtgtgtttttgtccacaacatggtttatcttggtgaatgttccacatgaacttgagaagaatgtgtgttgttctgttggatgaagcattcatggattttaattaaacccagttgttgcctttcaactaaactttgtcctttctgattttctacctgctggaactcttttttttttttttttttttttttggagacagggtattaccctgtcaccaggctggaatgcagtggcatgatctcagcctactacaaccaccacctcagccttctgagtagctggaactacaggtgcgtgccacatacagggctaaattttgctttttttttttttttttttttgagacagagtttcgtccttgtcgcccaggctggagtgcagaggcaagaactcagctcactgcaacctccatccactgggttcaagcgattctcctgcctcagcttcacaggtagctgggattacaggtgcacaccatcatgcccggctaatttttgtatttttagtagagatggagtttcaccatgttggctaggctggtctccaactcctgacatcaggtgatccacccaccttggctttgcaaggtgctgggattacaggcgtgagccaccacgtccaccaaccatctattctttttcacaagtattgtatttttaaatttttgcctcctttgaacatttaatgagtattaatggaattacacttaaagggttttttggagcctaggcaacatagtgagacccatctttacaaaaaatgaaaaaattagccaggcatggtgatgcacacctgtagtcccagctactcaggagtctgaggcgggaagattgcttgagcccgggaagtcgaggctgctgtgagccgtgactgcaccactgtactctagcctgggcaacaatgagaccccgtctcaaaaataaaataaaggccgagtgtggtggctcgcgcctgaggctaggagttcaagaccagcctggccaacatggtgaaaccctgtctctactaaaatacaaaaaattagctgggtatggtggtgcgtgcctgtaatcccagctactcaggaggctgagacaggagaattgcttgaacccgggaggcggaggctgcagtgagccgagatcatgccactgcactccaccctggggaacaagagcaaaactccacctcaaaataaataaataaataattttgtggtgatttgtttacctctcagtgtgtgtgtgtgtgtgtgtgtgtgtgtgtgtgtgtgtgtgtatttatttatttttttgagatggagtctcactctgttgccaggctggagtgcagtggtgtgatctcagctcactgcaacctccgcctcctgggttcaagcgattctcctgcttcagcctcccgagtagctgggactacaggcatgagccaccatgcccagctaatttttgtatttttagtagcgacggagtttcaccatgttggtcaggatggtctcagtctcgacctcgtgatccacccacctaggcctcccaaagtgctagggattacaggcgtgagccaccacgcctggccacctctcagtatatttctcatatgctagtatctgaagctgcaggctatccgttccaatggttgtggtgtttagactttttcacggttttgtttttgtttgctttgtggaaaataatgctcctactatttttgtttcagtctgcaagtgcaaacgcacaataaattctctggtagttggaaaaaaattactggatcttggtcaagtttaaatttacaaacttaaaaaaagtggtggagtgtatcagttgatcctccgtttgtacatgattgttctctgtagtcatcaacactaatgttatctttttttttttttttttttttttgagacggagtctcgatttgtctcccaggctggagtgcagtggcgcgatctgggctcactgcaagctccgcctcccgtgttcacgccattctcctgcctcagcctctcgactagctgggactacaggcgcccgccacttctcctggctaattttttgtatttttagtagagacggggtttcactgtgttagccaggatgctctcgatctcctgacctcatgatctacctgcctcggcctccccaagtgctgggattacaggcgtgagccaccgcgcccggccactaatgttatcttaatcgactagttttgtcttcctactcagtttgaagtgggaactatttgacatttatatcctcattagcaaggagatgaaccttttttttctgtttttttttctttttattatttagtaaaaggctatatatgaaatctttatttatttatttatttttattttatttatttatttttttgagacggagtctcgctctgtcgcccaggttggagtgcagtggcgcgatctcggctcactgcaagctccgcctcccgggttcccgccattctcctgcctcagcctcccgagtagctgggactacaggcgcccgccacggcacccagctaattttttgtatttttagtagagccaggatggtctcgatcttctgacctcgtgatccacctgccttggcctcccaaagtgctgggattacaggtgtgagccaccgcacctggcctgtctttatttatttttggctggagtgcagtggtatagttatggctcactgcagccttgactttgcaggctcaagcaatcctcccacctcagcctcccaagtagctgagaccacaggcgtgcaccaccacgcctggccaagttttgtatattttatagagacagggtttcaccatgttgcccaggctggtctcgaactcctgggctcaaacgatctgcccacctcagcctcccaaagtgctgggattataggcatgagccatcacgcctggccaaaatgtttattttctattaaatgtaaatgtaaataaaccttacagagagcacccaggcatgcagatggacttgtcacgagggagagctccctggagccaaatttcttcctgctcagaccatagtcctaattacttaagaaaaccccttctaactgtgtggatcttttaacgtatggtgcacatgagtgcatggaaatgagagaacctgggacaacagcccctagagtgtctgtctgggatcacttcctcctgaaactggagaaaggggatttatgttcttttttttttttttttttttttttgagatagagtctcgctctgttgcccaggctggactgcagtggtgcgatcttggctcactgcaacctctgcctcccgggttcaagcgattctcctgcctctgcctcccgagtagctgagattacatgcatgcaccaccatgcccaactaatttttgtatttttagtagaggcagggtttctccatgttggccagggtggtctcgaactcctgacctgaggtgatccacctgcctcggcctcccacagtgctgggattacaggcatgagccatcctgacccagattttatgttcttttggaggtatgaaattacctgttaattttataatcatgggcaaattcaccatcagaccattgtggacatcagtgaagtcccctgaaaattgatactgtcaatctattcttcaaggtcagcaaagcccagatgacatgattatggatcttccagaaagtgctcttctgacattttatctcaatgtgtatatgtatttgtgctaaaaattggttggaagcagttctgaggctcatgggtataacgattttgtgaaagtctaagttgtgagggccccttccttgtgcctgagctgtcttcccagtaacttcctagtctcacgaaatgggacagaaagtaaaaggaaaaactgggtctatgatagatattacacacacagccgggcgtggtcgctcatgcctgtaatgccaacacatagggatatatatatatcggaaacaagttgaaattaatacgtctctaaaagagtatttccattcagtcagcagaatctgagtgcttctgatggcctcaaatacttcaggacgatataggcagctagaccttcttaaaagttggatttccacaagcctcctggcctctcatgtataacaaaaggggatagaagattctcaatgtgtatttacttattaaaacctccacctcggtggggggtcagcccccctgcccggccagccgccccgtccgggagggaggtggggggggtcagcccccccgcccggccagccgccccgtccgggaggtgaggggcgcctctgcccggccaccaccccgtctgggaggtgtgcctaacagctcattgagaacgggccaggatgacaatggcggctttgtggaatagaaaggcgggaaaagtggggaaaagattgagaaatcggatggttgccgtgtctgtgtagaaagtagacatgggagacttttcattttgttctgcactaagaaaaattcctctgccttgggatcctgttgatctgtgaccttacccccaaccctgtgctctctgaaacatgtgctgtgtccactcagagttaaatggattaagggcggtgcaagatgtgctttgttaaacagatgcttgaaggcagcatgctcgttaagagtcatcaccactccctaatctcaagtaatcagggacacaaacactgcggaaggccgcagggtcctctgcctaggaaaaccagagacctttgttcacttgtttatctgctgaccttccctccactattgtcccatgaccctgtcaaatccccctctgtgagaaacacccaagaattatcaataaaaaaataaattaaaaaaaataataaataaaaaaaataataaaaaaaagactgtctcaaacaaaaaaaaaaaaaaaaaaaaacctccacctcatttaatcccatatcttaaggaatgctgaatgatttgggtaataagaaattaggctgtgggctgggtatggttattcatacctgttatcacaacactttgggaggccggggcaggaggatcacttggggccgagagttaaaggtcaacctggacaatataacaaaaccccagccggaggcagtggctcacgcctgtaatcccagcactttgggtggccgaggagggtggatcacgaggtcgggagttcaagaccagcctagccaagatggtgaaaccccatctctactaaaaatacaaaaaattagctgggcgtggtggcacgcgcctataatcccagctacttcggaggctgaggcagagaattgcttaaacctggaggggcggaggttgcagtgagccgagatcgcaccactgcactcctgcctgggttacagagtgagactccgtctcaaaaaaaaaaaaaaaaagaaagaaaaaaaacccatttatctgggagtggtgttgcacatctgtagtcctaactactcgtgaagctgaggcaggaggatgtcttgggggcccagggatttgaggctacagtgagttaggattgctgcacttgagcctaggtgacagagcaagaccctgtctcttagaaaacaacaaacaaacaaacaagaaataagaatttatctcataaagaattgaagatcttgcctgtaatctcagcaatttgagaggccaaggctagtgaatcgcttgagctgaggagtttgagaccagcctgggcaacatggcaaaaccccatctctacaaaaaatatacacaaaatacttacctaggtgtagtggtgtgttcctgtagtcccagctactcaggaggctgaggttggaggattgcttgagccgggaggactaggctccaatgaactgtgattgtaccactgcactccagcctaggtagcagagcgagaccatctatgtctcaaaaaggaagaaaaaaaaattgatcctaaaatttgtctcatttgtgtaggatttctttcatttttctaagttgaactagatactaccattagagagcaataggacttacagtgaccacagtgaagatgtagctataagtttatgtgttcaatgtgctgttacatttctaacaattgagtcatgcactaaatgtttggagaccacaaaatcgtgtgtgaatttcttatgaattgaggatacctctcatccttgtcaatctcacctattctctacttatattggatgtttcaggactcagtggcttttgaggatgtgtctgtgagcttcagccaggaggagtgggctctgctggctccttcacagaagaaactctacagagatgtgatgcaggaaacattcaagaacctggcatctataggtaaggatgacatcattttttcttttttctttttttttttttttggggggggacagagtttcactattgtccaggctggagagcaatggcacaatctcagctcaccacaacctcagcctcccaggttcaagcaattctcctacctcagcctcccgagtagctgggattacaggcacgtgccaccatgcctggctaatttttttctttttagtagagacgggatttcaccatgttggtcaggctggtcttgaactcctgaccacaggtaatctgcccgcttcagcctcccaaagtgctgggattacaggcatgagccactgtgcctggccttcttttttttttttttttttgagtctcgtcctgttccccagggtggagtgcagtggcgggatcttggctcactgtaacctccgcctcctgggttcaagcaattctcctgcctcagcctcccgagtagctgggattacaggtgcccaccaccatgcccggctaatttttgtatttttagtagagacggggttttatcatgttggccaggctggtctcgaactcctgacctcaggtgatccacccgcctcagcctcccaaagtgtggggattacaggcatgagccaccgcaccccagtgacatcattttttcatatcgtcagttagagaactgccatttcttgctcataatcactgttccgagatttggaatctgaaaaggaaacacttctgtaaataaaccaggcatggttacagctcattgtgaacctataatctaataatatttgtataatttttaataatttatcatgattattcttgatctacattttaggggaaaaatgggaagacccgaatgttgaagatcaacacaaaaaccaaggacgaaatctaaggtgagttgcactcacaagaagtaacagtgttccttgaaagaatcttaaaaatgttatggccgggcacggtggctcacacctgtaatctcagcactttgagaggctgaggtgggtggatcatgaggtcaggagttcaagaccagcctggccaacatgatgaaaccccgtctctactaaaaatacaaaaaaagttagccagttgtggtggtgggcgcctgtaatcccagctactctggaggctgaggcagagaattacttgaatccaggaggcagaggttgcagcgagccgagatcgcgccactgcactccagcctgggcaacagagcgagactctgtctcaaaaaaaaaaagaagttgtgacacttttaaaacaagaagcaagcttagctccaaatttatttatttatttgttttatttattttttcttgagatgaggttttgctctgtcactcaggctggagtgcagtggcatggtctttgctcactgcaacctccacctcccgggatcaagtgattttcctgcctcagcctcccaagtagctgggattacagggacgtgccaccacacctggctaatttttgtatttttagtagagacagggtttctccatgttggcaaggctggtctcaaactcctgacctcaggtgatctgcccgcctcagccttccaaagtgctgggattacaggcacgagccactgggccccaaatttatttattatcagaaaatgtttaccaaaaatgttttctcaagtgacacagatgtccactggctgaaaaatattatacttgggccgggcactgtgcctcacgcttataatcccagcactttgggaaggtgaggtgggcggatcaccagaggtcaggagatcaagaccagtctggccaacacagtgaaaacctgtctctactaaaaatacaaaaattagccgggtgtggtggcacacacctgtcatcccagctactcaggaggctgaggcaggagaatcacttgaacctgggaggcagaggttgcagtgagcccagatcgcaccactacactccagcctgggcgacagagtgagactccatctcaaaaaaaaaaaaaaagaagaagaagaagaaagaaaaatattgtacttgggaacagttttgtttgtttgtttgttttgtgaaacagagtctcgctctgtcacccaggctggagtggagtggtatgatcttggctcactgcaacctctaacccctgggttcaagcaattcttctgcctcagcctcccaagtagctgggattataagcgcgcactactatactgggttaatttttgttttgttttgttttttttgagacggagtctcgctctgtcaccaggctagagtgctgtggcgcaatctcggctcactgcaacctcccactccctggttcaagggattcttctgcctccgcctcccaggtagctgggattacaggcatgcatcaccatgcccggctaatttttgtgtttttagtagagatagggtttcactatgttggccaggatggtcacgatctcctgacctcgtgatctgcccacctcggcctcccaaagtgctgggattacaggcgtgagccaccatgcccagccaatttttgtattttttagtagagatggggtttcactatgttggcctggatggtctcgatctcctgacctcgtgatctgcccgcctcggcctcccaaagtgctgggattacaggggtgagccaccatgcccagccaattttgtattttttagtagagatggggtttcaccatgttggccaggctggtctcaaactcctgaccccaattgatccacccacctcggcctcccaaagtgctaggactacaggcatgagccaccatgccaaggtgtggaaacagtattttattttatttttatttttatttttgagacgaagtcttgctctgtcacccaggctggagtgcagtggtgccatctcagctcactgcaagctccgcctcccaggttcacgccattctcctgcctcagcctcccgagtagctgggactacaggcgcccaccaccacgcccggctaatttttttgtatttttagtagagacggggtttcaccctgttagccagggtggtcttgatctcctgacctcatgatctgcccgtctcggcctcccaaagtgctgggattacaggcgtgagccactgtgcccgcccagaaacagtactttaaagcctcacatataatttccggaagccaaggtgagcagatcatttgagctcaggagttcgaaaccagcctgggcaacaagacgagaccctgtctctacaagaaacagaaaattcagtcagttgtggtggtgcatgcctgtagtcccagctacatgggaggctgaggtgggaggattgattgagcccgggaggtcaaggctgcagtgagccatgattgcatcactgtactccagtgcgggtgacagagtgagactctgtctcaaaatgaaaccaaaaaaaaaaaaacccatacctcaatattactgttttgataatagctatcagtgacacaagccctcttgcagaacattgagtatattcgtttttaaacaagtcagacggggcagaaaactatttccctgaaaatgataaaaatttagttctgctgccgggtgcggtggctcacgcctgtaatcccagcactttgggaggccaaggcgggcagatcacttgaggtcaggagttcaagaccagcctgaccagcatggtgaaaccacggctttactaaaaatacaaaattagctgggcgtggtggcgcatgcctgtaatcccagctacttgggaggccgaggtaggagaattgcttgaagctgggaggtggaggttgcagtgagctgagatcgcaccattgcactccagcctggggaacaagaacaagactccgtctcaaaaaagaaaaaagaactttagttctactacccgataatacatataaaatcattaatacacaaccagtattaccgtgcttctaattttttacagaagccatacgggagagagactctgtgaaggtaaagaaggtagtcaatgtgcagaaaacttcagtcccaatctcagtgtgacgaagaagactgccggagtaaaaccatatgagtgtactatctgtggaaaagccttcatgcgtctctcatcccttactagacacatgaggtctcacactggatacgagctatttgagaagccatataaatgtaaggagtgtgagaaagcctttagttatctcaaatcctttcaaagacatgaaaggagtcacactggagaaaaaccctataaatgtaaacaatgtggaaaaaccttcatatatcaccagccctttcaaagacatgagcggactcacattggagaaaaaccctatgaatgtaagcaatgtggaaaagctcttagttgttccagttcgcttcgagttcatgaaaggattcacactggagaaaagccctatgaatgtaaacaatgtgggaaagccttcagttgttccagttctattcgagtacacgaaagaactcacactggagagaaaccctatgcatgtaaggaatgtgggaaagccttcatttcccacacaagtgttctaacacacatgataacacacaacggagatagaccttataaatgcaaagaatgtggaaaggcattcatttttcccagttttttacgagtacatgaaagaattcacactggagagaaaccctataaatgtaaacaatgtggtaaagccttcagatgttccacctccattcaaattcatgaaagaattcatactggagagaagccctataaatgtaaagaatgtgggaaatctttcagtgcacgcccagcctttcgagtacacgtgagagtgcatactggagagaaaccctataagtgtaaagaatgtgggaaagcctttagtagaatcagttactttcgaatacatgaaaggactcacactggagagaaaccctacgaatgtaaaaaatgtgggaaaactttcaattatcctctagatttgaaaatccacaagagaaatcacactggagaaaaaccctatgagtgtaaggaatgtgcaaaaaccttcatttctcttgagaactttcgaagacacatgatcacccacactggagacggaccttataaatgtagggactgtgggaaggtgttcatttttcctagtgcgttacgaacacatgaaagaactcacactggagagaaaccctatgaatgtaaacaatgtggaaaagcctttagttgttctagttacattcggatacataaaagaactcacactggggagaaaccttatgaatgtaaggaatgcgggaaggcctttatttatcccacaagctttcaaggacacatgagaatgcatactggagagaaaccctataaatgtaaagaatgtgggaaggcctttagtcttcacagttcctttcaaagacatacaagaattcacaattatgagaaacctcttgaatgtaagcaatgtggaaaagccttcagtgtgtccacatccttaaaaaaacatatgagaatgcacaatcgatagaaactctataaatgtgagaaataggagaaagttttcaattctaacagatgctttcaaagttgtgaaaattcccactgaagagagaaatcctgtcaatgtaagtaatatagaaagcgagatacaagatgattcatgtatagtcaggtaccacataatcatgtttcagtcagcaatggaccatataggttggtagccccataagattatataacacctaaaacatttctatcaaccgcaatttagtagcagtagtaacaccatagtgcagcacattatttaagtgtttatggtgctggtgtaaacgtgctgcactttcagttgtataaaagtacaagacagcggccggggacggtggctcacgcctgtaatcccagcactttgggaggccaaggcgggcggatcacgaggccaggagatcaagaccatcctggctaacacggtaaaaccccatctctactaaaaatacaaacaattagccgggcgtggtggtgggcgcctgtagtcccagctacttgggaggctgaggcaggagaatggcataaacccaggaggccgagctgacagtgagctgagatccggccaacagagcgagactctgtctcaaaaaaaaaaaaaaaaaaaaagtacaacacagctgggcatggtcacacctgtgatcccaacactgggagactaaggcagtaggattgcttgatgccaggactactctggtcaacctagtgagaccctgtctctacaaaaaataaaaacattttctaagtgtggtagcacaccctgtagtcccatctacatgggaggctgaggcaggaggattgcctgagcccaggagttcaaggctacagtgaaccaagatcacgtgatggcagtccagcatgggtgacagtgagactgtatcaaaaaaaaaaaaaaaaaattggctgggcacagtggctcatacctgtaatcccagcactttgggaggctgaggtgggagaatcagttgaggtcaggagttcaagaccagcctggtcaacatgatgaaaccctgtctccattagaaatacgaaaattagctgggcgttctggtgtgcctgtagtcccagctacttgggaggccaaagcaggagaatcgcttgaacccgggaggtggagattgcagtgagctgagatctaccactacactccagcctgggtgacagagcgagactccgtctcgaaaaaaaaaaaattacagcacagatgtgcaatatatacttgataataaatggctaagttactggtttatatatttacaatcctgttttagaatgtattcctgtgtttttttaacagtaagacagtctcaggcaggtccttaaggagatattcccggaaaaactttgttatgataggcgatgacggctccatgtgcaggactgcccctgaacgtattctggcgggacaaaacatggaggcagaagacaatgatattgatgatcctcaccccgtgtagtcctacactaatgtgtgtttgtgtcttagttagtctttaacaaaaatagtttaaaaaaatttaatagaaaaagcttatagaatatggacataaaatatttttgtacagctgtacaatgtgttttaagctaaattattacaaagtttttaaaaataagtttataaagaaaataatgtacagtaagttaaggtttattcattattgaggaaaaaatgtttttatgaatgtagtgtagtccaagtgtacagtgtttataaattctccattagtgtacagtaacatcctgggccttcgcattcactcaccactcaactgactcacccagagcaacttctagtcctgcaagctatgttcatggagtgtcctatgcaggtgcatccttttttatcttttatactgcatgtttactctgtgtattttctgtgtttagactcataaatacttaacattttgttacaatttcctacagtgttcagtacaacaacatgttgtatggtttatagcctagtagcaatagactgtaccatatagtctagatgtgttgtagctataccatctagatttgtgtaagttcactttgtgatgtttgtaccatgaggaaatcacctacaacacgtttctcagaacatatacccatgattaagcaatctctgcctgtaaaatgctccagaaaattcacaccatgatataaattcatcacacacgatataaaagttaaggcaaggcatggtggctcatgcctgtaatcccagcactttgggaggccaaggcaggcagatcacctgaggtcaggagttcgagaccagcctggccaagacggtgaaaccccatctctactaaaaatacaaaaattacctgagcgtggtggcatgcacctgtaattccagctacttgggaggctgaagcaggagaatcatttgaacctgggaggtggaggctgcagtgagctgagattgtgccactacactccagcctgggcaacagagcaagactccatcccacacaccaaaaaaaagttaaaaattttttatcactggctcattcttcaagtacatctctggactatgaattgtaacttaactacttttccaagaagtcttggaagtgagataattctgtaagtactctttaagcagtggtcaaaagtttaaaaggttgtgttttctcattaaatcagttagtaaaacttttctctttctcttgatgtcttgattcatgagtaaactgaagtgtattttttttttttcgagacggagtcttgctctgttgcccaggctggagttcagcggtgtgatctcggctcactgcaagctccgcctcccgggtccacgccattctcctgcctcagcctccccagtagctgggactgcaggcgcccgccaccatgcccagctaattttttttgtatttttagtagagatggggtttcaccgtgttaagccaggatggtctcaatctcctgacctcgtgattcgaccgcctcagcctcccaaagtgctgggattacaagcttgagccaccgcacccggcctgaagtgtattttttttttcttttaaagaccagtgttagtagaagtgtatttttaatatacaattagttttaatttgtgtatagtttttcagttgttctctgaataaagagattgttgaatactgacacactgtaactaggatttttcctactggcctcatgtggaaggtggtgcatatattacccattatatatttatttcaccttttccgaaaaactgctttttaaatttcttggccagacacggtggctcactcctttgtaattccagcactttgggaaaccaaggcaagcagatcacttgaggtcaggagttcgagaccaacctggccaacatggtgaaatcccatctctactaaaaatacaaaaattagctgggcatgttggagggcacctgtaatctcagctacttgggaggctgaggcaggagaaatgcttgaacctggaagtcagaggttgcagtgagccaagatcacaccactgcactccagcctggacaacagaacgagactccatatcaaaaaaattaaattaaaatataataaatttcttgccgggcgcagtggctcacacctgtaatcccagcactttgggaggccgaggtgggcggatcacgaagtcaggagattgagaccatcctggctaatacagtgaaaccccgtctctactataaatacaaaaaattagctgggcatggtggcgggcgtctgtagtcccagctactcaggagtctgaggcaggagaatggtgtgaacccgggaggcggagcttgcagtgagccgagatcgtgccactgcaatccagcctgggcagcagaacgagactccatctcaaataaataaataaataaaatgaatttcagctagaagagccttattccattttcctttttattaaacatctggcataagttggtaagtatgtgaagtttatcatatattcttatgcgaattattattttcgccttttttttataattctgtctgggatttgaatagtagagtttgaattcaggaaggacacctgtgataggacaataaaatctagagctggacgtggccctcctgctacctgtcgacacaggtaaatttcctagaatctgttccctttatagatccatgttgaaattcacttatagcctcacttgcatgagatttgccaggcagaagtgaagaagacattagtcaggtattggaaccccaccatacagggagacagcctgcttcctgctcattttcctggttattttctctgccaatcaaaagtatcctgaaaacaccctgagctgcttgacttccattctcaaagagatgtgttggtttccacagttgtctccacaagctccgcatcaaagatccacgtacagtttggattttccttctagccttcatgtgtggcccaagcatctatttcagactgtcatggttggcattgttctctgaggttctgtcttccctttgtgtttctatgagctttaatttgtatggttcttgttctgttaatgccactagggactatgtattcctgattccaccatgacagctacagtaaaacagtaaaaaaaaaaaaaaacaactatatgggagtttgttctcttactgcattatacagtgactactctcccccatccttccatttgagaataatcaccttcctcatatcagacaaattgtgggtgtttccaactattcctgaatattctccatcggtttattttcatttatgtttggttgtatgcaactaaaataatgcattttttatttatttgaagcaaaagcttcttagatgtttcttagaaatattttgttaactgtttccaaacaacatgtatactatcaaatattatcatcatctgggtgcagtggctcatggctgtaatcccaacaatttgggaggctgaggcaggattgcttgaggcctgaagttggagaccagcctgggcaacatagtaagaccccatctctattagttcaaaaacaaataattgtcttccccgtttcctgaaaggctatattaaaatatcccattacagttatgaatattcagatcaactttgtcattttgtcaagatacattctgactcaatattagcatgtgcataaatgttctggtatttttcccttagatgttttttattcttatacttacattttgtcataaaacaaaattctcttcaaaacagtggtattttcagtgccctattgccagcaatcaccacggtcacacctgtattcagaattaattatggtaatacagtagtcaattctgatccaaagttttgctttctgtggttttagtcactcatggtcaaacacagtccaaaaatacttagtggaaaattccagaaataaatgtttcatagacttatttatttatttatttatttgagacagagtctcactctgtcgcctaggctggagtgcaatggcgcgatctcagctcactgaaacctctgcctccgaggctcaagcaattctcctgcctcagcctcccgagtagctgggattacaggcatgtgccaacatgcccagctaatttttgtatttttggtagagatagggtttcaccatgttggtcaggctggtctggaactcctagcctcaggtgatccacccacctcagcctcccaaagtgctgggattcctcccatcttacacatgaaaaaacagaggcagagagagcacagggtctttcccaaactcatgtaaatcagaattatagagtctcaaagttttgaagttctagtgtgttccaccacctgtcaaactttttttttttttttgagatgaggtcttgctctatcacccaggctagattgcagcggtgcgatcatagttcactgtcaccttgacttctggggagtgatcctcctgcctcagcctcccaagtagttgggactgcaggtgcatgcttccataagcggacttagaaaatttgaatgaggccgtactgggtgcctcatgcctgtcatctcaacactttaggaggctgaggtgggaggatggtttgtgcccaggagttccacgtggcagtgagctgtgattacaccactgcacagcaacctgggcgacagtgaggctcagtcgtgttgaaaaaagaaaagacagagagagaaagaaaagaaaaagagagaaagaaagaaaaagaaaggaaagagaaagaaagcaaaagaaagaaaagcagagatatgagagaaggaaggaaggaagggaaggagaaaaaaggaaaaaaaaaaagaactgagaccccatctctacaaaagtaaaaaattagctgggtgtggtggggcacacctgtgattccagctactccagaggctgaggtgggaggatggcttgagcccaagagttcgagcctgcagtgagccatgatcatgccactgcactcagacctgggtgacacagttcatgtcagccaccttccaaaacaggcaagaatgctatgtgtgtcatagcctataatttgtaccacattaaggttgctttgatctagggcagaacttatgagtcctttttttttttttttttttttttgagaaggagtcttgctctgccacccaggctggagtgcagtggcgcgatattggctcactgcaagctccgcctcctgggttcacgccattctcccacctcagcctcctgagtagctgggactataggcacccgccaccatgcctggctaattttgtttttatatttttagtagagatggggtttcaccgtgttagtcaggatggtcccgatctcctgacctcgtgatccgcccgcctcggcctcccaaagtgctgagattacaggcgtgagccactgcacccggccaaagcaccattctctaaaatccccaccaagcctttgtctccttgcagttagctcctctctgggtgtgctgcctggtggaaccctgtaatgtattttctttctttctttcctttttttttttttttttttttttttgagacggagtctcactctgtcgcccaggctgaagtgcagtggtgcgataccggctcactgcaacctccgccccccgggttcaagcgattctcctgcctcagcctcccgagtggctgggattacaggcgcccgccaccgcgcccggctaatttttatatttttagtagagacgggatttcaccatgttggccaggctggtctcaaattcctgacctcaggtgatccacctgcctcagcctcccaaagtgctgggattacagacgtgagccaccgcgcccggccaaccttgtctcttaaaagtaaaaacaaaatgagagataagaagaaatatttttggaaggcgcacaggggaataaagccaccagggcattttaatcataaactccttgtcccatcaaggccatccctaccctttgccctcccctccccaagacctaccctgccccgccccatcctggccccctccagccttcatccccctttttcccctctttccccactttgtctcctcttccccactttatcacctcttgcccctgtgcggccccgccgaactggaaacgtttccagcaggtgattcagatgcgcctgtgcaggactgtgaccaggtgcaagtcgccctcccctgacctccctgtttagcctgaatgatccttcccaagtgtgttgctccattctcgcgctgctataaagaactacctgagctgggcgcgatggctcacgcctgtaatcacagcactttgggaggctgaggcgggtggatcacctgaggtcaggagtttgagaccagcctgactaacatggtgaaaccccatctctactactaataataaaaaaattagccgggcgtcatggctcacgtctgtaattccagctactcaggaggctcaagcaggagaatcccttgaacccgggaggcagaggttgcagtgagcggggatcacgtcattgcactccagcctgggcaacaagagtgaaactccgtctcaaaaaaaagaaaaaagaaaaaaactacctgaggctgggtaattcacgaataaaagaggtttaattgactcacagttctgcaggctgtacaggaagcaaggctgggaggcctcaggaaacttatcaaggcggaaggctactggggatcgagtcagtcttcacttgaagcaggagggatcaggagagagcacgaagtgggaagtgccgcacatctttaaaccatcagatctcctgagaactatcacgagaacagcaaggggaaagccgcccccatgatctaatcacctcccagcaggtccctctcctggtattagaaattaaaattgaacatgagatttggttggggacacacagccaaaccatatcaccaaggttttctgtaagtgtctgatgaatacgcacagtgggaactgcagctgagctttaggtggcatcctaaaagcctctttgtcagcctgagcccgtgtcctcttaagagggagagttggggctgggtgcggtggctcacgcctgtaatcccagcactttgagagaccgaggcgggtggatcatgaggtcaggagttccagagcagctggccaacatgatgaaaccccgtccgtactaaaaatacaaaaattagccgggcgtggtggcgggcgcctgtaatcccagctacttgggaggctgaggcaggagaatcgcttgaacccaggaggcagaggttgcagtgagccgagattacaccaccgcactccagcctgggcaacagagcgagactctctcaaaaaaaaaaaacaaaaaaaaaaaacggggtgggcgacttggaaaagatttcaggactcactctcagcgacggtgccccacgtgagttggaggccaggagcaaggtgccttcctgggcctccctggctgcgatcctgtcctcaggagggcgaccccagtcacgtgcgaccgctcaaggcggtcctcagaagcggaggggacctccgcgggccagtaggccttcagaattcttagaaatcactcacccccgtcctgcagtgacaatctcaggagagcctgtctacagactggcgcctgtagagaagatcctgccattgcccctggcttccaggaactgaactggattctgagcatcatggcagaatcttatcccacctatgcagcaggctagctccagggagaaaatataaacgtcaggccgggcgtggtggctcacgcctgtaatcctagcactttgagaggccgaggcaggcgtatcacgaggtcaggagatcgagaccttcctggctaacacagtgaaaccccatctctattaaaaatacaaaaaattattcaggcgtggtggcgggcgcctgtagtcccagctactcgggaggctgaggcagaagaatgacgtgaacccgggaggcggagcttgcagggagccaagatggcgccactgcactccagcctgggcgacagagccagactccgtctcaaaaaaaaaaaaaaaaaagaaaagaaaatataaacgccaacaaacaggtaattcccaatcaccggcaagaccccgccggattggaccccgaccctcagcagaggccaccttgtccgggtctcactctaacctgtaccgcggccccaagatatcagaggctgccttggtggacccggggcactttccacagaactccctgaatggccaaggctggccctggcctcaataggccaactcagcaaacgtggagaaggcagggaacggtgggtaagggaagtcatcccaacattttgggagtccgaggcgttatatggcttgaacccaggagttcaagatcagcctgggcaatatagcaagaccccatccttttttgagactgagtcttgctctgtcgtccaggcgggagtgcagtggtgcaatctcagcttactgcaacctctacctcccaggtttgagcgattctcctgcctcaacctcctaagtagctggaattacagttgcccgccaccacgctcggctaatttgttttttgttttttgttttttgcttttgagacggagtcttgctctgtcgcccaggctggagtgccgtggcgcaatctcggctcactgcaagctccccttccggggttcatgccattctcctgcctcagcctcccgagtagctgggactacaggcacccgccaccacacccggctgtttttttgtatttatagtagagacggggtttcaccatgttagacaggatggtctcgatatcctgacctcgtgatccgcccgcttcagcctcccaaagtgctgggattacaggcgtgagccaccgggcccagcctttttttttttatttttagtagagacaggtttcaccatgttggccaggctggtctggaactcgtgacctcaagagatccacccacctcggcctcccaaagtgttgggattacaggagtgagccaccgcaactggctaccatttctaataaaagcaaacttttgttcaagtgtattcatcaaaaaggcccctcgcatgtgaccacagccaagccaggaagccttcttcaggtatccctagccagcctgcaggaggtcttggaaacttgttcaacggataaatataactgggcccacaaagaatcacaggaatacttaatccctccagcctccagggccagcctggccccagctgtgtaggggggcttagaagtgtcttcaggactcatctaactaccaggcccaatctggcggtgggcagaacctggggcccttcccacagcagtccgaggaccttcctgactgtgatcctggccccagcagggggacctagaaaacgccaatgaagctgtgggcaagcaggcaccaggtgggaaagcggccaagctcagggcaccctactccgctcacctgcgacggcagcagccagtccccacgggcggaggggacctcatgcgacattcagcccgcgagattctcagagactgctcgcccgcaacacgcagtaacgatctcaggagagcccatgatggggcggcgcgtgtcgtagccgagaagactctgtcatcgccggcgacctcctggaactctctcttgcggtttgcagccagatcacttcccatacacgcggcagccaagctcaggggatggcatcagactgaccctaggtggcgctcgaacacccgccggacctcaccagacaggcactttccccagtctacaccgcctggttcgggtcccacatgaacctgtaatacactcggcccaaagcggtcagaggatggcctggtgggcccggggcaccctccacggaactccctgaatggccagggctgatcccagcctccataggcagacagaaaatgtgaatgaagccctgctggatgcctcatgcctaccacctcaacactttgggaggccgaggcgggaggagagatgtgccctggagatgatgcagtgcgctatgatcgcatcattgcacagcagcctgggtgacagcgagactcggtcgcgggaaaaataaaacaaaaaacaaaaacaaaccaaaaaaaatgaaagagagagggagagggagggtggaaggagggaggaaggaagggagagagggagggagggaaggagggaaaaagaaagagaaaaggaaaaagaggccgggcgcggcggctcacgcctgtaatcccagcactttgggaggccgaggcgggcagctcacctgaaattgggagttcgagaccagcctgaccaacatggagaaaacccttctctactaaaaatacaaaaattagctgggtgtggtggcgcatgcctgtaatcccagctactagggaggctcaggtaggagaatcgtttgaacccgggaagagcaggttgcagtgagccaagatcccgccattgcactccagcctgggcaacaagagtaaaactctgtctcaaaacaaaacaccaaaaaaaaaaataaataaaaaataacccacaagagtgaaagtctgtctcaaaaaaaaggaaagaaaatgaagaagaacattcaagatggaaggaagggagggaagggaaagaaagaaaggagggagggagtgagggagggaaagaaaaagaaagagaaaagaaaaaaaaggaacatttgggaaggcccacaggggaatgaagccacaacaatatcctactcagaacctccttctcccatcaaaaccatccctctacctccccttccccctgctttccccgccactgcttctgcggctcccagtgatccccctccttttaccctccccgtccctctcttcatgcccctattcctatctcctatcactcagaattggcaacgttttcagcaggtgcttcagacgcgtctgcataggactgtgaccaagtccaagtcgcccacccttagccctccctgtttggccccagtcatccctccagacgttttctgaaggtgtccgatgaatggtcgccatggaaactgcagctggggtctgggtgccctccttcatcctccctgtatgcctgggcgagtgtcccttcttaaaaggggccttgggaaaaatttcaggacgcactttctgcgacggtaccttatgtgagtcggtgggcaggagctgtgtgccctctggggtccctggctgcgatcctggccccaggaaggggacctagaaaacttttccagtaggctgggcatgggctcatgactgtaatcctagcagtttgggaggccgaggcaggcagatcacttgaggtcaggagtttgagcccagcctggccaacatggtgaaaccccgtctctactaaaaatacaaaaattatccgtgcgtggtggcacgtgcctgtaatcctagctactcgggaggctaaggcaggagaatcgcttgaacccaggaggcagaggttgcagtgagccgagatcgcgccactgcactccagcctgggcaacagagcgggactctgtcttcaaaaaaaaaagaaaagaaaaagaaaaaaagaggcccggcgcggtggctcacgcctatgtaatcccagcgctttgggaggccgaggtgggcggatcacgaggtcaggagatcgagaacaccctggctaacacggtgaaaccccgtctctactaaaaatacaaaaagccgcgcctgtagtcccagctactcgggaggcggagtttgcagtgagcaccactgcactccagcctgggtgacagaccgagactccatctcaaaaaaaaaaaagaacgaaaatgtatccagtgatgctgtgaacaacccggcaccagatgggaaagcggctgagcccagggcgccctaccccattcacctgcgacggcaccagtcggtctccaagggcagagggaccttcatacgccactcttcttccgcgattctcaaagattcccatcccgcagtaatgatctcaggctcccccggatcccgcagtaactatctcaggagagtccattatgcagcaccgcgtgtggccggccgagaagaccttgccatctccttcggtctcctggaacactgtcctgggctctccggccggatcttgtcccacacacgcgacaaccgagctccggggacgatatcagagtgatcacaaagtggcgcccgaccaccggtgggactgcgccggacctggaccttcccctaccggaccagatgccacctggtcagggtctcactccaacttgtgtctcggcccaaagcagtcagagggtagcctgctgggcccgggccaccctccacggattccctgaatggccagggctgattcccagcctctacaggctggcttagaaaaattagggagaggctgggcatggcagctcaagcaagtcatcccaacactttgggaggctgagacggggggattgcttgagcccaggattctgaggttgcagtgtgttttgatcaggccagcacactccaacatgggtgatagagggagtcccagtctcccttcccgggttcatgccagtctcctgcctcggcctcccgagtagctgggactacaggcacccgccaccatgaccagctaattttttgttgttgttttttttttttttgtattttttaggtggacaggaagtagaatttattggtgagtattaagaggggggcagcacattggaagccctcatgagtgcagggcccaccacttgtccagagggccacgattggggatatacttgaccccacagccatctgggatgagccgcttttcagccaccatgtcttcaaattcatcagcattgaacttggtgaagccccacttctttgagatgtggatcttctggcggccaggaaacttgaacttggccctgcgcagggcctcaatcacacgctccttgttctgcagcttggtgcggatggacatgataacttggccaatgtgaaccctggccacagtgccctggggctttccaaaggcacctcgcattcctgtttggagcctgtcagccccagcacaggacgacatcttgttgatgcggatgacgtggaaggggtggagccgcacccggatatggaagccatctttgccacaactttttaccatgtacttattggcacaaattcgggcagcctccagggcttcagaggacagctgctcatattcatctgacaccatgtggccacagagcggaaactcatccacttttgcctttttccgccccaggtcaaaaatgcgaatcttggcatcagggacacctcggcagaagcgagactttgggtacggcttgttcttacaataccggtaacaacgggcggggcggcggcccatggcgacaccaggatcttcagtggcacactgaagggaaagagaaattttttgtatttttagtggagatggggtttcaccatgttggccaggatggtctcaatccggagactttttaaggttttcagggggttcatcctgtggccagattctatgcagcaggacaactatgctggggtgcccttctcgggcctctctggctcacctgtaataatccttgtctttagagggtgacttagacaaattttcaaggagcacatccaggaaccaggccccatgtgtgaccaaaactaagcctgggttgctctgccctatggttcctagctgacctaagctgtttccttatccccaccccatccccaaggacttacaaatatttcctggaggcacatcccacaatcagaggcctctgcaggatgacagcccacctgtggtccttctgctggcctccttctttggctgcgaccagtccctaccactggctgggacacaggaaactttgcactcagagcctcctatgaaggagcccacatggggctgtgggcaaactcaggtcaccctctccaggcctctctggttggccaggtccaatctctcttcctggagagggacttataaaagttttctgcggaggagtcacatgttaaaacagggacgcatgtgggaccagggctgagcctgaagagtactccacagtcctccttactcagcccaggccagtcactaccataggagagggacttagaaatatttttggtgggggtgatacctccagtaacaggtccaatacggcagacaggtgcagggagcccttttcaggcctcacaagctggcccagccctccgtcaagaaggaaacttgaaaaagaacacatctgggctgggcgcggtggctcacgcctgtaatcccagcactttggaaggctgagacaggcagatcacggggtcaggagatcaagaccattccgccttacacggtgaaaccccatctctactaaaaatacaaaaaactagccgggcatggtagcaggcgcctgtagtcccagctactcgggaggctgaggcaggagaatggcgtgaacctgggaggcagagcttgcagtgagccgagatcgcaccactgcattccagcctgggcgacagagcgagactccatctcaaaaaaaaaaaaaagaaaaagagcacatctggtgaccatgccccaagtgggaccacagcagagtgtcccctggcaccccaccctggcatccctaggtggcccatgctaactggcccattggaggggttctcagaggaaacattagaggaccaacatgataccaccctccctgggcttccctgtccaccctgggccagtccttgtcatcagagggggcctaagaaacatatgctgttggtgcttgcaaactgaccccagaacacttaaaaactttttatttgtatttatttatttttttgagatggagtctcactctgtcaccaggctggagtgcagtgacacaatctcgcctcactgcaacctccgcctcctgggttcaagtgattctcctgcctcagcctcctgagtagctgggactacaggtgtgtgccaccatgcccagctaatttttgtatttttagtagagaaggggtttcaccatgttggccaggatggtctcaatcccttgaccttgtgatccatgtgactcagcctcccaaagtgctgggattacaggtgtgagccaccacgcactgcctactttttttttttttttctagagacagggtctcactctgtcacccaggctggagtacagtggagccatcatggttcactgcagcctcaaacttttgggctcaagcaatcctcccacctcagcctcccaagtagtagctggggattataaatgcacgccatcctatctggataattttctaatttttaatttttttttcaagagataggatccagactggttgcagtggctcatgcctgtaatcccagcactttgggaggccaaggcaggtggatcacttgaggtcaggagtttgaggccagcctggccaacatggtgaaaccccatctctactaaaaatacaaaaatgagccaggcatggtggggggcgcctgtagtcccagctactcggaaggctgaggcaagagaatcgctagaacccggaaggcggaggttgcagtgagccaagattgcgccactgcactccagcctaggcgacagagggagactctgtccctcacacacacacacacacacacgaagagataggatctggctctcttgcccaggctggagtgcagtggtgtgattatcacttactgcagccttgacctcctgtgctcaagcaattctcccaagtagttgggaatacagacacttcacccagctaattttttaaattttttgtacatacagggcctcattttgtggcccaggctagtctagatctcctgggctcaagtgattctctctcctcagcctccagagttgttaggattacaggagcaagccaccacacccggctctgggtcataaattctgtccccctctaacaagcaaataacagacaaaaaaaacccacactcagtcacagagcgacctgagtcttagtagtagcgttttaatggcagcagccccaagaggagagtcagagtctggtctgcccccggagcaggaggcttgggcttggagggcccatcccagcagacctaaccatccacctccttccattgaactgaggccaggaaagtgcggatttccatgggttccagcgtgatgttggccgggtccagctggtacggagtttggtggggtgtggggcctggagaggtgcagggggaaggaggagtgaggaggtgcagacttcctctgactcaccccacgatgcttcctcccctgggtctagacacagctgcatatccccgaatctgtctccagggcctcaatcccagactcttaacctgcttccccggccccgaataccacccccaggtccaatgtcctcataccctcaatctggccactgtcctcgtaccctcaatctgaccccaggggtgatgaacaccctcccagaactagacatggatggggattttcaaatcttgttcttgggactaaacagcacccacaaacctcaagacccattcctggtttgccgcacccatttcagatcctttaagcccctaacctgggtctggactctgccccataccctcatgacctttttgggtcctggccaacatcccatgcctcacacattgcccccacctgccggccccaggtaagactccaccccttccctacccctgaccagggccccacctgtgtttgttgtccacttgagcctggaggctgcctcgcggagctggttggccaccagcgtggtctcctgcaggcgggtgatggtgaaggtggagaacaggtcctgcggggaaggggatgggcccagatgagttggggcaaagccaggtttctcttctctccctctctcttgcctctctccgatctccttctcaattttgcccttctcaccctcaagttcaaggtaacgggggcgctcaggttacgtccggaatcctctcctacggcaaactggtgctccaagcgcagcagcaccatttcggggccccagctggccagcgtgagcaggtgcaccgagggcggcaggtccctgcgcagccctgagaactgcgggagagagggcggggctgagttggagaggggcggggcctggatggagaagggcggggccgagccaggtcaggaggcagggctaggttgtaggggcggggtttcgccggagaggggcaaggctcagccgagaggagcggccagggccgtgacagggaggactgagccaatggggagatgggtcggtcccaagcttagggttcgagtcccgatggagcagaactgatgtgacctgagactttgggagttacggcggggctgaagccgcggggctgggtgaggcaggacagagcctgggggcggtgagagggcggggctaaagtgaaatgggcggggccggaggtgagttggtggtttaggggcatgagctagggctgtgcctctacacagtccaggggggttgggactgggctggcactgggcggggactgcccaggggatggggttggcccgagggtttggggctaattatggccaaatggatccccgctgagcctaggaaactccgcacccaaacccggctccctggtagacttcaatccggtcctctctgcctaccccgctgcccctcacctgcgtgcgcggaggagccccgagattgtaggcggcgccgccacccggggccagcaccacctgaggggccaggacctcctgctccgccaggagccggtgtccggcggctgcagcctgggctgtgtccagcagcaccaggtggcgccctcgcacccacgcccccgacccgttctccattagtggctccgatactccgcgtccatcgtccttcagcagccttcggtgcacctggggggagagtggccaggagggggtgagagtcgtgggtttgtgggtgtccttgggccagaaactgggtaagggcgtgtgggaatgtcaaaagaaattaaagggtgggaggaacggatgaggatgaaggtgagggtctggtagggcaaccccagcagaggcaggatccaagtaggcatgggaaccaggccggaaggaggtaaatgcctaacaggggggcctggatatggcacgccagagcgtggagggagcctgggcaggagatggagaaaaacggagaggaaaagccacacacagaaatggagtccttggccgggagcggtggttcacgcctgtaatcccagcactttgggaggccgaggtgagtggatcacctgaggtaaggagttcgagaccagcctggccaacatggtgaaaccccatctctactaaaaataccaaaattagccgggcgtgatggtgtgtgcctgtaagcccagctactcggaaggctgaggcaggacaatcacttgaacccaggaggcagaggttgcagtgagctgagatagtactattgcactccagcttggacaacaagagcaaaactccgtctcaaagagaagaaaagaaagaaacggagtcctcagcttagtggggcctgaaagcagagaactgggccagaaacagccttcaaggtccagcaggggtccaggttgggaggaccctggctcggatggggctctgacccactcaccatgagctccagcgagccatctctcaggctgctgcccccctgggagcggtcagtcagcacagtcagctgcatgtttccatcctgggagttgaagggtgaaagtagagggcagtcaaccccaaccccaggcagctttgagatgctgcagataaggggtgattccctttctatcgaggtggggaggtgcaggatgggggagagctaccgtgatgtaaatccgggtgttgactggatagtagtttcctgccacgggctccgtctggttcagtttccaggtgggtcgataatcccgcctggggttgggggtgagctgatcaggcttgggatctggctccccaactcttttttttttttttttttttttgagatggagtctcgctctgtcacccaggctggagtgcagtggcgcgatctcggctcactgcaagctccgcctcccggcttcacgccattctcctgcctcagcctcccgagtagctgggactacaggtgcccgccaccacacccggctgatttttttgtatttttagtagagacggggtttcaccatgttagccaggatagtctcgatctcctgaccttgtgatctgcccgcctcggcttcccaaagtgctgggattacaggcgtgagccactgcaccctgcctggctcccccgcccttcactctcccttcgtcctctgtctcccacactcatgtaatcagcaaatttccctcaccacccctgggccccaacacaccacagaccaccccctcagtgctctcagtcaccccccacctcctctccaggatctcccggccattgctgtctgtgtagaagcgtccctttgtctccagcggtgtgtcaaaacggctgatgacctccttcccccaggtgtcgctgtacccaatgggatggcaaggttgtgagccttggataaacccctctgcccttgcttccacacccctctcccagcctgtgccactcaccccacaggtatcggccccaccgaccactctagctccaggtgccgctgtcctgggtacaggcgaaccacctgggaacaccaagctgagaagttctggtgcacctcctgcaccaagggtgtctgcgggcacacgggtgaggtggatgtcagtctgtacctgagcagaggtgagtcctacaaatgtcccccaaccctggccataaaccccattaaggcctacatcaaggtcaaccttcagtcaccgccacataattctttttttttttttttttttgagacggagtctcgctcttttgcccaggcgggagtgcagtggcgcgatctcggctcactgcaagctccgcctcccgggttcacaccattctcctgcctcagcctcccgagtagctgggactacaggcacccgccaccacacccggctaattttttgtatttttagtagagatggggtttcaccgtgttagcaaggatggtctcgatctcctgacctcgtgatcagcccgcctcggcctcccaaagtgctgggattacaggcgtgagccaccgcgcctggcccacataattcttttttctttttttttttttgagacagagttttgctcttgttgcccaggatggagtgcagtggcacaatcttgcctcactgcaacctccgcctcctgggttcaagcaattctcctgcctcagcctcccgagtagagggattgcaggtacctgccaccacccctggctaatttttgtatttttagtagagacggggtttctatccatgttggccagacttgtcttgaactcctgacctcagatgatctgcctgcctctgcctcgcaaagtgctgggattacaggcgtgagccactgcacccggcctctttttttttttttttttttgagacagggcatcactatgtaggcacctaatcagcaaatgctcccacctggtcttgaactcctatgctcagcgatcctcctgcttcagtctcccaaagtgctgtgattacaggcatgagccactgcatctggcttaccacatcactcttgagcgtggcataaacgcctcctgttcaccattgccccatagaataggattctagcttggcacatggctacctgggataaagactatattgtccagtcttccctgaggctatcagtagctgagtgaccagtttgccccatagaaagtgatccaagtggtgtcaacaatgttccttgcccctgtccctctgctactgactcaaacacaaatgtggcggctggagcttcagcagctatcttggaccatgaggtggaaactgaatattggggaaggcagagcaacaagatagaagaggaggtcctgggtgattatggaaccaccccactttctctggactaacagccagactttttgttagaagaaaataatcttctatcttattctagtcacagttaatttgggtaactctgttagaacaggcaaaactatatacagatatgcagacattcatctcaaagggactcacatgaaacgcgaggctcttgaatgtggacaaatgtgagttttgtcatctatgaaagtcaaacatcaatgagaggccctgggaaaccactgttcctagccagatgcacccataggcattcaccctgagactcacccaaacccaatcaatccaagggtggactctcaaatattcactccagatagaagctcctcttactacagactttggtgaattcttcaagcagtgatatttggctctcctgattcatgggccaagtgggaatgccccacccccaatttccaaaactaagtatgtaaacgtccacagcagatgtgaatggctttgtatgatgtgtcctatggggagactctcatacgaccagctatgaatatcaattctatggaaggaccctcaaatatttcccccgctgatctgtgggtcttagcccactgatctgaaggaaaagtaaatcctcccctaccctcactctacacatggcccaccaccctcttgggctccataacttccccattcccaactgcccactcatcattcctagtccctgaccttcaccaggtggatctgagcccagcggctcacaggcagcggtttctgttggttgggtctgaagatgtaggcacctgaggcctggtcactttcgttgtcacctatactggcgttgtacctggagttggggcaggtgagagtcaggtaaggggccctagctccatgccgagcaccaccaccccaccctcaggcctggtgatcttcccttaccagaagaaggtctggcgaacaggcagcaggagttgctgattcatgttcataatctccatcaacagccctgtgtcaggatcaaacgttgcccggatgtgctgggcagaaaagggtccacagatgggtttgtgtgtgtatgtgtgtgtgttttctttttttaatttttcttttttctttttttttttttgagactgagtctcactctgtagcccaggctagagtacagtggtgcaatcttggctcactgcaccccccacctcccgggttcaagtgattctcgtgcctcagctatccaagtagctgggattacaggtgcccaccaccccgcctggctaattttcatatttttagtagagacagggtttcaccatgttggccaggctggtctcaaacccctgaactcaagtgatctgctcaccttggcctcccaaagtactaggattacagacataagccactgtgcccagccggatttttattttttttttttgagacagaaacttgctgtgtcgcccaggctggagtgcaggggcgcaatctctgctcactacagcctctgcccctgggttccagcaattctcctgcctcagcctcctgggtagctgggattacaggcacatgccaccatgcctggctaatttttgtatttttagtagagacggggtttcgccatgttggtcaggctggtctccaactcctgacctcaggtaatccacccgccttggcctcccaaagggctgggattacaggcgtgagccactgcacctggcctgggttttttgttttttttttttttttgagactgagtctcgctctatcgcccaggctggagtgcagaaagtggcgtgatcttggctcactgcaacctccgcctcccgggttcaagcaattctcctgactcagcctcctgaatagctgggactacaggcacatgccaccacacctggctaatttttgtatttttattagagacagggtttcacaatattggccatgctggtctcgaactcctgacctcatgatccacccccccctcagcctcccaaagtgctgggattacaggcatgagccaacacgcctggcccctttttttctcaatttaaaatttttttagggccgagcgtggtggctcacacctgtaatcccagaactttgggagaccaagttgggtggataacctgaggtgaggagtttgataccagcctggccaacatagtgaaactccatctctactaaattaaaaaaaaaaaaatttaaatttgttttctagagatgggggtcccactatgttgcctggggctagtgtccaactcctgggctcaagcagtccaccacacccagccattcaacctgattttttttttgtttgcttttgagacagagtcttgctctgtcccccaggctggagtgcagtggcatgatctcggctcactgcaacctccacctcctgggttcaagtgattctcctgcctctccctcccgagtagctaggactacaagtgtgtaccaccacgcccagttaatttttgtatttttggtacagacgaggtttcactgtgttggccaggctggtctcaaactcctgacctcaggtgacctgccagcctcagcctcccaaagtcctgggattacaggcatgagccaacgtgcccaccccagccttttctttttttctttttttttcttttttttttttttgagacggagtctcactctgttgcccaggctggaatgcagtggcgccatctcaggtcactgcaagctccgccttccgggttcacgccattctcctgcctcagcctcccgagtaactgggactacagatgctcgccaccacgcctggctaaattttttgtatttttgtagagtcagggtttcaccgtgttagccaggatggtctccatctcctgacctcgtgatctgcctgcctcggcctcccaaagtgctgggattacaggtgtgagccaccgcgcccggcccccccaaccttattttcaacctcaccacctcttaccagggccttccagggccagtgcagtcaaccccttccaggtccctgcacttccacactggctgcctacagtctgttccccacaacagccagagcacacctgtgataccctaagtcccatcaaagccctcctctgctgcggaccagggccaacttgggcatctgatgtgtgaaccacaatgccagaactcacaagacttttaggggcctgtgggaacgttttaacttcttttattttattttaataaaaatatgaaaaagatgttttcttcctaacatgaacagtcctactgcagaacttcttttattttattttattgagacagggtctcactttgtcacccaggctggagtgcagtggcatgatctcggctcactgcaacctctgccacctgggctcaagcaatcctccttcctcagcccccaagtagctgggattacagacgtgtaccaccacccccagctaattttttgtagagactgggtttcaccatgttgcccaagctggtctcaaactcctgagctcagtagatccacccacctcagcctcccgtggtgctagaattacaggtataatccacgatgcctggcctattttattattattcttttcagacagggtttcactctgttgccaggatggagtacagtgggacaatcattactcactgcaacctcgaactccccagctcaaacaaacctcccatctgggcctcccaattagctgggacaactcctgggctcaagtgatcctcccgcttcagcctcccaaagagctaggagtagacacatgagcaacaatgactggcaaaagccaaagtcttcctgttggtcctcaaggccctcaaggtctgacctgtcacccgttcaccctgcttcagccacactgagctccttgtggctcctggaattctgcacactctcctgctcgaaggcttttatgcctgttattctctccccacctggatctctcttccttcaaatagccacacggctccctccctcaggtcatatcttaaatgtcacctttatcgggaacaccttccctgaaacgtccctgccaaaattgcgaaccaccacctgccaccaactctgacatgtctgtcaagtgtcacccatgatcacactgggtcctcataacagtcccaggaaaggacactgaggctcagacaaaggtcacttgctcaaggacacacaatgaggggagttgtgacaggaggtcataagcctagggacctgctgacccagagtccacacagctcaccatgacacttcaaatttgtcacaggagcaggaaaggggattgaaatggggtctcacctcattttcgatggttaaagcaggggaccaggatcttctggggatgggctgtggtgcgcgggcctggggcttccagcgaggcacctgggctactgaataggtgctgaagcccagggcgggcagtgaggctgagaacagcagctccggagggtgcgcctggctgtctgagctgggaaatattaccacctcggataaaggaggagggaaactgagtcaagagtacccatggaaagctatacatgcatggagacaaaaaactcaaggaaggaaaagagtcctgagatggggaaaggaaatggaggtgtgtgtggtggggggacagtcagattccaaggaaatgattgcagagaagattcaccaggtggaaaaaaaaacccaccgggagggtggagagaccatggagtcgggggagtgaaggaggaagtaggggaagaaacccttgaggcaggttctcgggggaggaagaggtttgggggaggacgttttctggaatgaaggagatgtccataaacagcaataaattttcctggggaagcggggtattaaaatggaggaccagccaggcacggtggctcatgcctataatccagcaggcggagtttgaagtgagccaagatcgcgccactgcactccagcctgggtgacagagcgagactccgtctcaaaaaaaaaaaaaaaagggaggaccactcacaggaggcatatgttcccaaggggagactgatattaaggggcagagggagaagatacaagaggggggaagagatatgcatgagtgggaggtattcatggaagcaggcgatatccatgggggcgatgaggaaatgcccactgggggaggagtcccagcgggggaatattcgttgtttgggctcacatcgctgggcactgtcctgccattggggtccttcacaacgaaaacgccttcgctgaccggcagccgtaccatccaattcaccttccgccccaggggattataaacgatgacctggaactggggaggcgggggtcagagagggcatgggtcacagcaggccttctccaaacccacccactttgcacagaaacacccctggctggtcctagtgtggtcacggcacttaaggccaagccccctcgagatgcgttgttctctctgctgacccagcttcgcagcccacgtaatttcactcctgtatagtcctccaaaaacattttccaactaccccctctaaagcccatctgccctagatccacccctcccgtcccggctcacgcgcgccgccgtctggctgagcgggcagatgctgatgtttagctgttggcaaaaggtgaagtgatctttgaagcctctgagccgcgccagcgcgttgctcagaagaacctgcggaagagcgcaaagggaccggtgggttcaggacgccaggcctgactcctcccctctcctcaggccccgccccgttccggtctctgtcccgcctccctcaagagtcgccccaaaaccccttctagccccaccctgctgcccttgactataccccatagctgtctccgcctcctcttgcccacgccccgcctccttcccccctccaaagccccgccccgttcctgtatctttccccgcctcctacaagccccgcccccacgagcccttgtagccccgccacagggctctcggctacgcctcacacctgtctctgtcccctttcccaggccctggccccgccccttcctgtctccacccccgtgtctcccaagtctcgccccgcgcacctcgcaaggcccccagcctgccgcaagctggcgcgcgtagtcgttggccacgtgctggcgggaggtgccgctgacggcgtcgtgatgctggagcacagccatcgcctcatctgctcatagacaatgagtccggtgaggttctgtgggactcagctgagaccccaaggggaagcgaaaggtccggtgctggcgggcaggattcttagaggctttaagaaggaactcgaggacggctgggggcggtggctcacgcctgtaatcccagcactttgagagaccgaggcgggcggatcacgaggtcagatcgagaccatcctggctaacatggtgaaaccccgtctctactaaaaatacaaaaaattagccgggcgtggtggtgggcgcctgtagtcccagctactcgggaggctgagtcaggagaatggcgtgaacacgggaggtggagcttgcagtgagccgagatcgcaccactgcactccagcctgggagacaaatcgagactccgtctcaaaaaaaaaaaaaaaaaaaaaaaaaaagaagaaactcgaggggggcggcctaggggtggtttccaacttcagccgcaaacctcttcccctcttgggcccgacacttactgaggggtgcactgtctccggagccatagggtcccacgttggccgccaggcccaccagcgcctccagctggttgcacacctggaggcagaggggtatgttggggcgcccagcctgtcgggcctcggggctgcatgccccctctagcccggctcctacccacctgcaggaagttgtagctgaggcgctcgtagcgtttgagggccggccgactggaaaagtaaccggtccagaactggtgggggccatccgcgtaagggaagaagtcgtcatgtttcactgacctacagcggcaggggcattgagggcagggtcatgacccacggggcatgccaacccccccaagctccccagtttccccaaataccaggtgaggttggccttgttcagctcccagaggtaacaagcgggggtggagtagagaacatggacactgcttccttttgcctgctgctgggggaggcgacggagtgagccctcgggagtccgcaccttcctgggggcccacacttccacacatgtgtgcacattcatgcatcccataggttcagtttctctaaatacatatttggcgtgcaagccaatggttgggtgtgaaaatgaattttggctgaagtcaaacatgaccactagccttttttaaaaggatttcagagatgcaagaataaacctgaaattttactaaacttttacaataattccaactttattattaaaaacttttgtggaaaaactaagtgtgacattatagggcaggaataatcgttttgcaggactgtcagattgttaccaaaaaacacaactttttttttttgggacggagtcttactttgttgcccaggctgtagtgcagtggctcaatctcagctcactgcaagctccacctcttgggttcacgccattctccagcctcagcctcatgagtacctgggactacaggtgcccgccaccacacccggctaattttttgcattttttagtagagacggagtttcaccgtgttagccaggatggtctcgatctcctgacctcatgatccgcccgcctcagcctcccaaagtgctgggattacaggcatgagccaccgtgcccggcctagacacaatttttataatgaatggaggtgcactttcacctgagcaaggtggaggaacaagaaagtgacctatgtgaggaaaaggatgtttgttttgcacgagctgtgtcccccaatgtacacagtaggtgctcaataaacttttttttttttttttttttttgagactgagtctgactctgtcgcccaagctggagtgcagtggcacgatctcagctggctgcaaactccgcctcccaggttccagcgattctcctgcctcagcctgccgagtagctggtcttacagatgagtgccatcacgcccacctaatttgtagtatttttagtagagacaaggtttcaccatgttggccaggctggtctccaactcctgtcttcaagtgatccgcccacctcagattacaatcccaacactttgggaggccaaggcggacggatcacctgaggtcaggagttttgagaccagcctggccaacatagtgaaaccctgcctctactaaaaatacaaaaattagccagggttggtggcacatgcctgtagtcccagctacttgggaggctgaggcaggagaatcactagaacccaggaggcagaggttgccatgaggcaagatcatgccactgcactccagcctgggtgacaaagcaagactcttgtctcaataaataaataaataaataaaattttaaaaagaaaaaataaataaaaataaatgacataaaagagctgttttggtgaaatagcagtgctgggagcgagtggaaggtgggaatggagattgcaccgtagtgaggacaagattgatgggaaggggtgtctgagatgggagaggggagacaagtttctgtgctgatgagagtgactgactgtgcacacagccacagccacaggccacttagtgcaaaacactaacacatctgtgttgggtaaaatgataactgcccaaaagtgtccatgtcctgatccccagaacctattaccacattagattacatggcaaaaggggaattaaggttgcagatggaattgaggttgttcatcagccaaacttaaagtagggaaattaggccacacagtggctcacatctgtaatcccagcaccttgggaggccgagcggggtggatcacgaggtcaagaaatcgagaccatcctggccaacatggtgaaaccctgtctactaaaaatacaaaaattagctgggcgtggtggcacgcgactgtagtcccagctacttgggaggctgagacagaagaatcacttgaacccaggaggcggaggttgcagtgagccgagagcacgccactgcactccagcctgggcgacagagcgagactccgtctctaagtaaataaataaaatgtggaagagagaggcagaagaggtgagaatgagagaaagggatgtgattacagaaacagggtcagaaagatgctatgtggctggctttgaagatggagccaagaatagattttgaatgtgggtaacttctagatgttggaaaaagcaaggaaattatattctctcctagagactgcagaaggaacacagccttgccaacaccttgattatagcctggtgagactcaggctggattttttttttttttttttttttttgagacagagtctttctctgtggcccaggctggagtgcagtggtacaatctccgctcactgcaacctccgcctcccggattcaagagattcccctgcctcaggctcccgagtagctgggattacaggcacgcaccatcacacccagctaatttctgtatttttagtagagacagcgtttcaccatgttggtcaggctggtctcgaattcctgacctcgtgatctgcccggctcagcctcccaacatgctgggattacaggcatgagccattgcgcccggcctcatgctggacttcttacctacagaactgtaagacaatgtatttctgttgttttgagctgctaagtgtgtggtcatttgttatagaatgaccacaatagaacaatagaaaacaaagacagcactgagagctatgcacataacccaaggcccccggatgcaagcgcacatgtgcacaagggtaccacagggtaggcgcactgacctgcgcatttaccagccggatgagcttgtcaaggttcttgaaccacatgttggcattctcatattggaagtccgagcccatggtcatcacagtgtggttggtgcggtaataccggccctgcaggcaagaggggagtcctgaagccagaggatcctgggccatccctgtgtatagctgtgttttgatgtatatggggtcaaggatgttgggtgcacaggcatgggtgggggtatggcacttgggagcgtggggacacagataaaagtagccaccagttgttgagcagttctcttggacccactacctagaagagggcatccagtcaccatgccatgctatctcttgcccagcctatgctatctcttctaatgaggaatgcacataaatccaggagggggacattgtgatggtgaatagaatagcatcttcctccagggggcatgagaacatgattacaggggctcacacctgtaatcccagctactcaggagactgaggcaggaggatcgcttgagtctaggagtttaagaccaacctgggccacacagcaagaccctgtctcaagaaaaaaaaaaaaaattaatctaaaacaattttttttttgagacagagtttcactctgctgcccaagctagagtgaagtgacgtgatctcggctcactgcaacctccacctgccaggttcaagcgactctcttgccttagcctcccaagtagctgggattacaggcgtgcgccaccacacccgactaatttttgtatttttagtagagacagggtttcgtcattttggctatgctggtcttgaactcctgacttcagatgatctgcccatctcggcctctcaaaatgctgggattataggcgtgagccaccatgcccagccatcaatttttaaagaaaggaaaaaaaaatttttttaaggagaacgtgttatgccaggcatggtggctcacacctatatcctagcactttgggaggccaaggcaggaggatcacttgagttcaggagtttgagaccagcctgggccacatggtgagaccttatctctgtgaaaaaataatgttttttaattataaaaatgttaaaggctggacgcggtggctcacgcctgtaatcccagcactttgagaggccaaggctgtgggtcaaaaggttaggagttcgagaccagcctggccaatatggtgaaaccccctttctactaaaaagacataaaacttagccgagcatggtggtgggcacctgtaatcccagctactcgggaggctgaggcagaagaatcgcttggacccagtaggtggaggttgcagtgagccgagatcgtgccactgcactccagcctgggcgacagagtgagtctaaaaaaaataaaaaaggaattctcaataaaaatgttaaaaatagactaggcacagtggcccacacctgtaatcccagcactttgggaggttgaggcgggcagatcacctgaggtcaagaccagcctggtcaacatgacgaaaccctgtctactaaaaatacaaaaattagctgggtgtggtggcaggtgcctctaatcccagcttcttaggaggctgaggcaggagaatcgcttgaacccgggaggcggaggttgcagtgagctgagatcatgccactgcactccagcctgggtgacagagcaagactctgtctcaaaaaaaaaaaaataataataaataaataaaaatgttaaaaatagaggccaggtgcggtggctcatgcctgtaatcccggcactttgggaggccgaggcaagcagatcacttgagctcaggagtttgagaccagcctggacaacatgatgagaccccagtgcaaaaatacaaaaattagctggatgtgcttgtttgaacccaggaggcagaggttgcagtgagccgagatcgcaccactgcactccagcctgggtgacagagtaagactgtctcaaaaaaattaaaaataaggagaacgtgttaggggatgcctgtaccatggaaagagctcattgtattgtatataccggactcgaaggttctggacaccagggttacctgggcagtggccacatttaggaagtaatcgaccagctccttggcgttgtactcggggctgcgagggtcctccaccagcggctgatcgacacacagcacatcccagcacagattccttggcgggttgtaaccattgggaagcacacctgcaggtcacaccaagttcaaggggtggcccatcacccagaccttccctggtttcaaagccggccatgtcccacccaggatgggcttcagaatttgtgtcccaatgcaaaaggaaatgcagggcctttgttcccagactataggaattccaggacagtgacaacagagcagatatcaagcccagggcccttctgagtgtgtggcaccatggctggccctgccctcaccaagccccctaccagtgaagaggtccgcggtcgggggcttcaggctggtgctggcccgccacacctgctccatctccagcttctgcatccgtacccacttatcttgataatcaaggcgcccaaagaagaagccgtcgaagcccatctggggatgagggaggaaaaggcagtgtgaattagtgcccagccctctcaccaccaaactcccctctgcttgggaggggcaggtcagagcacaggttaaaaagcagtgctaggtcgatgtggtggctcttgcctatgatcccagccttctgggaggccaaaacaggaggatcacttaaacccaggagtttttgagaccagcctgcacaacacgggcagactgtctacaaaaaatttaaaaattagccaggcgtagtggtgcgctcttgtagtctcatctactaggggggctgagacaggagaatcgcttgaatccgggagattgaggctatagtgagttaggattgcaccactgcactccagcctggatgacagcaagaccctgtctcaaaaaacaaaaacaaaaacacgtagggctgaaacagagaggcctccagcttatttccaagcttggggaagtttcagaactcaccaccttgggctagcagggagagggcgggtccaacatcagaacccaggttcacctccccagcactgtcaaagcgcagagcaggcctgactccaggaatgaggttcccccttccacagcctgaggatggatggggtctgagcacaggtaatgaacctgtttttaaggcagcctaggcatccacttgccacccggtttagggaggagccaggacccgagctagtgggtggggccagaacaccaagaggggcctattaggggagagggcggagccagccggagctgggtcagcctgggctgggcatagccggctgaggccagagctcaaaagccactggctttacggctcactcaaggggcagggcttcaacaggcctaggcctgggcctggtccttgtgagattgcagggagagggcggggtttgactgggcgagggaggagccagagtgagtgaagaagtgggcccaagagaggtcccgggtcgcacctgcgcaaacagcgaggcctgctcccgagagtggccgaaggggtcaatgtgccaggccacacggggtcgcccatcattgccaaatgtgtcctccagaaagcgcagcccaagtgtcatctggtccacgatggcaccgtagtgggtggctgcctcatcgttcatcacccagccaccattggcgaactccaggcgccctgtgccaggacaggcaaggtcagggtcagcggtcagagccaggagtgggagtagggtgggtgatactgggaatgtgaaagcctgcctgtgtacacatttctggcggaaggacaagaggggtcgctcccaggccatagttcccagatatgggaaagaggccccctgcatggcaggcttcccagaggatgcacagcaggtggggctttgtgggatgtataggaggtctccaaatggagagtccaggcaggcggagcgacacgcatgttatacagcttgcacgtggcatgacaaatctcagaaaccagagatgcagaagcagaagctgggctgggcttcctcttttcacttccttggggtaggctcaccctggcgcacaaggtctcgcacgacttcctgtgtggcatttgtctgctggtgccaccaacgggagaagaaggcaatctccacgtaaatgaagcgacgggtgggatctgccagcaaggcagagatgaccgagtccaggatgtactgcacaccggcgtgctggatgtcattcttgactgtggataacagggataaggctctcagggaacagcagagccaagggggttattcctagacagaggagcccaaaccctggatattagggtagcactggccccaccctaatgtccaggacccagagggattacagggaccatggggatcccagggaccagtccccatcctctactcacttccataaaagtactggtccacggttttgagccagcccacgtcatcatgtgtgtgaggcagcaggtgcacgttcagcatgttcggctgcactgtggggcatgtctgcacagggaccccaaacacacataccttgtcaataacccccgaggtcgggggctgcagagtaagtcttgatctagaggtgagtgactcagagaggcctgatctcgcctatgtgcagaggaggccaggccctcccaggcaggacacacacatacatagttgtgctcatagatacaactccactttgcacaaccccacagggcagctctcattcacactccgggaaaataataatagaagtagctgatgtttgttcagcatttgccgacagcagacggccaccgtgggaggtggggtgatgttatccccagtttccagatgaaggcactgaggcttagagaggataggtgacttgcccaacgtcacacactcaggaagtgtaagagctaggctggaatttcaggcagactccagagtcccagctctcagccagcacctccccccacacatacactgctcaccccctgccacctcctgcccctccaatcccacagttaagtgcagacaaagtctaggcaagcatcccggagacacggaggcaggtacaatcagacacagtcctatactcagatgcgcacagccagacctcgcaatgacacaaagcacgcactcagaccacactgtcatatcatcagccattcactagacacccacaggacagacccacccacacctctagactgtattctgggtttcactctgcctcctgtacgtttcagctcggaggccccactcacctcgtatcccccggcccgagcaccggcagccgccagcaacaaaaggaaaaagcagagaggcgggagcggtggccgcagggcgcgggacatggtccaggggcctgctgagtccaggcagccgcgagcgcagacccccgaagcccgcgcgtaggcgcccatggctcagcagcttcctcctggggttccccggccctggaaaggccgggcaaacgccccgcccccagacccggccgggccaatcggggtggggggcggggccagggcgcggtctggaggctcacgggagagaggctgtagccctgggcaatcccgggggtcgttacaggaaggtaggaaaatgccaccctcagggcactggttgggctaaaggtgacactggcgtctcacgggctatgaagacggaatgcctcttaatgccggaattccaagacggaatgcctcttaatgccggtaggagcagaagtgcttttcctaagggggccgggttttcctagccggtgtagtgtgtccatgggaatccagggtgtccgtcccatggaccttcagcgctagggtcctggaaggacctagcttgcctaagaggaggatctgatgaagagtcctatactgtggggattgggacgttgggtaaatacccctggagtaccagggatgggatccagcctggttgagaaggatccctgggtgttccggagagaaaagagggtctgacaagtggggaaggaccccgagtctttcatgcctttcccaattcctaccagttcattctctgataagaaaacaaagcccagggcaggcgcagtggctcaagcctgcaatcccagcactttgggagggccaggctggtgaatcacttgggcctgggagtttgagaccagcctgggcaacatgggttgttttgtagagacgggtttgaaaacacaaaatttgtaattttacacaaaatgtaaaaatacaaaaattagctgggcatggtggcacatgcctgtaatcccagctacttgggagactgaggcaggagaatcacttgaacctgggaggcggaggttgcagtgagccgagatcaagatcatgccattgccctccagcctgggcaacaagagcaaaactctgtctcaaaaaaaacaagaattaactgggcatggtagcacgcatttgtggtcccagttacgtggcaggctgaggtgggaggattgcttgagcccaggagtttgaggctgcagtgaacatagattgtgccactgcactcagcctgcatgacagatcaagaccattttctttcttaaaaaggaaaaaaaaaaaaggaaaccaaagcctagattatctaggtcagcagggccatctggtgagttgccagagggcagaagtcactgtcttgtccctagcacctgacttaagacacaaggtttatgaagtaagcaaatgaacagccagaagcctccagactggggccccacaccaggcctatggggctagagcccttcccgccaggtaggaggaacaccccactgaacagaagaggctgacagccagagtgaaaaactttattaacaacaggtttcaacgagaaagcaaatgaatacccctagaaacatggacagcatctcccccagcagcaggcaggggaagggaggcaggaggggtaagcctagggtgttccctaggaaagggccaggttccctctatccagctgggggcaccgagacggcctcattcagggaagtccaggatggcagctgaaggcagcaggtttagcagccaaagcccaggcctagtggatagacagggtccaaaatgtgacccttctaggctggtatcaccatgggggcgtcatgggctgaggattctgcagataggacatcaccacggcagagatggacagcctgagacaggagagaggtgtcagtctaggatggccaggctggggtccccccaccccttactcaagagtcacttgttctgtagggcaagtctcacatgaagctactcatcatttgcttcgtgtcctccgagctccgagagttggcaaagctgatgaaggagcagtagacagcgacccaagcacaccacttcagctagggaaaggtaagtgggtgggcaggttagtgaaaggcacaacaatgagtccccgaagccacctttccagacaccagatcatgcccactgattccatctgatgcagctgggaccttgccccacccggaattcctcagtcccacctgctcatggcatactctagatacgtggtttctagtcctactgtctggcctgcgtctctcaggaccaagagagactctgacatcccacatgcttaagaccctgccctttttccacaactcctctccaagttgcttcaaagcctggccccactcgcagaccaatctgccacatccccaacctgactcgaatccttgacttcaccaaagactggggctttctcggcccagcgtcatcgcagccccactcccggccgatctcaggtcccgccccatcagcaatgacaagacaccccgcttcattccaaacccgcccccgggcctcgttctcaggtccaactacacccatagaagctcaaccccgcccaccttaagcatgaggccgcacatgctgaagatcatgcccagcaggttcatgtagtccggcgtcgggtcgtccaaggccgggttacattcgctcggcgggggcttgtacctgcgacaggctcgagggtcaggggcgctcaggtcctgcccccgggatagacaggcgcttcccagggccccgatccacacccacaacccgaacccgtgcccacgacgctggggtcctcacctcagcactttgttcggcctccgtgggtccgacatattgttagtggacatagcgagtcgaaggccagatcacgcctcttccgctgcaggaatcgcagcttccggcgtgcaagctgagggcggattttagagtaacacccgaggccctcgcatttccgttcctcatgacagaggcttggactccccttacccagagaacggagatttaggagaagccagaagtcttcctttcaaagggaaaatggggaaaagaacctgaaagcgggcttcaatagttccaacccgatcaccgaaatgccaaaatgatgaacccggaagtgataaacaggaagtaggtcaggaagaacaataataaggttacacccaagcgtgggtttctaaggcgcggaattttccgtacagaccgatttaaggctgcaaggaaggagtcctgggagcatggctttccctgagccaaagccgcggcctccagagctgccgcagaaacggttgaagacgctggactgcgggcagggggcagtgcgagccgtacgatttaatggtgagcgccttcgtcttcattccgggtcctcctcccgcctcctgagatcgacggcccagtaacccccgcctggtgttccccagtggatggcaattactgcctgacgtgcggcagtgacaagacgctgaagctgtggaacccgcttcgggggacgctgctgcggacgtacagcggccacggctacgaggtgctggatgcggccgggtgagccggggaccaggctgggatgggagcgctgaggctgggatccgaggtcgatgctgatcctcctcctcctttactccagctcctttgacaacagtagtctctgctccggcggcggggacaaggcggtggttctgtgggatgtggcatcagggcaggtcgtgcgcaaattccggggccacgcaggggtgagtgaaagcctggagaccctcatttgagtggaggggacccgtattagcgcataggtggtgacacggccacccccattacaccgtaaggatcccttccccagatgacgatcccccactccgcatgccaggctaggcagtcaccaacccctgtccttgctgttcccccaaaacctttcacctccccttcgcccttgctttaaccgacactgggaaccctgcctttatcccagtcctccaaagtccagcctcctctgagtggcaataactttctcagaaggtgaacacggtgcagtttaatgaagaggccacagttatcctgtccggtgagtctggggcctaagcacgggggcccagggtgctgccctccccctccaaacctgacctcaccatcatgctggcctcacaggctctattgattccagtatccgctgttgggattgccgctcacggaggcctgagccagtgcagacgctggatgaggccagagatggcgtgtccagtgtgaaggtgtcagaccacgagatcctggcagggtgagtggagccaggacctggtctcaccccaggtgctacggggaatcatagctgcccccatgctcagattaaaacctactctcagctgggcacagtggcacacagctgtaatcccagctacttgggaggctgaagtggaaggatcacttgagtccaagagttcgaggcaccattgcactccatgctgggtgaaagacagactgtctacaaaataataataatctggccgggcacggtggctcacacctgtaatcccagcactttgggaggccaaggtgggcagatcacttgaggtcaggaggttgagatcagcctggccaacatggtgaaaccccgtctctactaaaaatgcaaaaattagccaggtgtggtgacgggagcctgtaatcccagccactcgggaggcggaggcaggagaatcgcctgaacccgggagttggaggttgcagtgagccgagattgtgccactgcactccagcctgggcgacaaagtgagactccatctcaaaaaaaaaaagataaaatgatttctaaaaataaataaaaataggccgggcgctgtggctcatgcctgtaatcccagcactttgggaggcagaggcaggcggatcatgaggtcaggagatcgagatcattctggctaacacggtgaaaccccgtctctactaaaaatacaaaaaattagccgggcatagtggcaggcgcctgtagtcccagctactcaggaggctgaggcaggagaatggagtgaacccaggaggcagagcttgctgtgagccgacatcgcaccactacactcctgggcgatagagcaagactccgtctcaaaataagtaaataaattaaataaataaatacataaaaataatcataaggaagaatttttgttttttttgagacgcagtctcgctctgttgccaggctggagtgcagtgacgtgatctcggctcactgcaacctctaacttctaggttcaggcgattctcctgcctcagcctccctagtagctgggactacagtcgcgtgccaccacgcccagctaatttttgtatttttagtagagacggggtttcgccatgttggccaggagggtctccatctcttgacctcgtgatccacctgccctggcctcccaaagagctggaatcacaggcgtgagccaccgcgcctggtggaaaaaatatattttctattcattaagtggaagtgaagagatcgtcataaagatcttcgtgttgagaaagcagaggaggaggaagaggagggattgatcttggtgtctcacagctgatagaggcagaagaaaatccacatataagtggacgcgttcagttcaaaccgtgttgttcatgggtcaactgtactttgaaaagtgctccctctggtggctgtggggggtgcagggagaccagaacagtctagatgctggtgctgggtagtggggaaagtggtgggactgagtactgaggaggaggagctggagaatgcaggaaaagggggaattgggccaggtggggtggctcacacctgtaatcccagcactttgggaggctgaggtgggcggatcacctgaggttgggagttcgagaccagcctgaccaacatggagaaaccccgtctctactaaaaatacaaaattagcagggcgtggtggtgcatgcctgtattcccatctactcgggaggctgaggaaggagaatctcttgaacccgggaggcagaggttccggtgagccaagatcatgccattgcactccagcctgagcaacaagagcaaaactctgtctcaaacaaaaggaagaaaagggggaatcagaaggactccaagggcttggaaagggggtgtgggtcttggaaatgatggagtaggacgtaattggccctgggcctgagtctcaaggccagagcttcagaattccactcctgtgcactggaagagcaggcccactgggctgggaaggcacagggctgcctggagccatgtgagtgtagtcaaggttcccgctggatctaccctctcctgcagctccgtggatggccgcgtgagacgctatgacctaaggatggggcagctcttctcagactacgtgggcagtgagtgtggctggggatgtgggacaggcagggaagatggggggccaaccaggggcaccccaccctcactcacctacccacccttcccccaaggccccatcacctgcacctgcttcagccgggatgggcagtgcaccctggtgtccagcctggactccacattgcggctcctggacaaagacacaggggagctgctgggcgagtgagtccttgtggtcgtggggatccccttccctcctctcccacccctggagaggaccaagccccccgatcctgtccacccttaggtacaagggccataagaaccaggaatacaagctggactgctgcctgagcgagcgtgacacacatgtggtcagctgttctgaggacgggaaggtgttcttctgggacctggtggaggtgaggtgcccccagccctacttcatacctagatgcctgccccatctcagccctgtccttacctcagtcactccagggcctgaaggctaggatcttttttttttttttttttttttttttgagacaagtcttgctctgtcgcccaggctagagtgcagtggcgcaatcttggctcactgtaaactccgcctcccaagttcaagcgattctcctgcctcagtctcctgagtagttgggattataggtgcgtgccaccacacccagctaatttttgtatttttagtagagacagggtttcactatgttggtcaggctggtcttaaactcctgacctcatgatccacccacctcagccttcccaagtgctaggattacaggcgtaagccaccacacccggcccttttttctttttttgagactattgcccaggcaaatgcagtggcgccatctcagctcactgcaacctcttccccccagggttcaggtgattctcatgtctcagcctcctgagtagctgggattacaggcccctaccaccatacctggctaatttttgtatttttagtagagacagggtttcaccatgttggccaggctggtctcaaactcctgacctcaagtgattcacccgcctcggcctcccaaagtgctgggattacaggcctgagacaccgtgcccagcttgggctagagagaagatgaggcaggaagggcattccaggcaaagggaacagcatatgttaagaggtgtagcctgcgcatgcatcagtcaggaaacaaaggcttcagggtggcggcaggtgcggcaagatccggggtcaggctgggctgcagatgccaggccgagcaactggcactgacccctgggcaagggggagccgacggccatgtctaaccttgggtgagatagggctgcagtcattcaagaaactggagctacatcttagcatccctgtgcatggtttcaagccctgagccctgtccttgacatgtcccagcctggtggggagtcaggccagaaacagaccatcctggtgtagtggggtcagagccgggggaatctcggcaaaggagacatcagcgctgggcttggccaggggaactaaggcccataagaggatggagggaaccgggggggccctgaagacttggcggacaagctcttgctttaggaactaaggtagcaagaatgttccacctatttcttatgggcccagtagaacagaagttgccttggagggcaggcacatcaagggacattttcaaggtggaaagaggaagcatggcttgcttgaggaactgtttacattgtgttgggaccaggggaagtggggatcattggggctgccaaatggacaggatggagcccagctggtggcagggaacaggcaagctgtgagcaaggcatgctccaaacatggtagtggcagaaaatcagcagtctctggacatggtctagaagcagagccaagaggaataactgatagaggaacatgtggtacaagaaaaagactcccggccaggcatggtggttcacacctgtaatcccagcactttgggaggccgaggggggtggatcacgaggtcaggagatagagatcatcctggccaacatggtgaaaccccatctgtactaaaaatacaaaaattagctgggcatggtagcgcgtgcctgtaatcccacctactcgggaggctgaggcaggagaatcgcttgaactagggagtcggaggttgcagtgagcccagatggcgccactgcactccagcctggcgacagagcaagactccatctcaaaaaaaaacagaaaaagaaaaagactcccaaagccaggcatggtggctcacacctgtagtcctagcactttgggaggccaaggcaggaggatcacttgaggccaggagttcgagaccagcctgggcaacatggtaagaccccatctctgctattttaaaaaataaaaaatcaataagaggctcccaagacttgcggcctgaacacctggtaggacagagctactgaggggctcagtctgaggtagattaattttgcagtgtctaggaggcaattagaggcaggtggctgaaggtcggggagaggtgactgagggcttcaggcaggactgagatggggggtgcccagggacctcagaaaccagggtacagcccagccacagataaccactccctacccctcgctccacagggtgcgctggctctggccctgcctgtgggttccggtgtggtgcagtcgctggcctaccacccaacagagccctgcctgctgaccgccatgggaggcagcgtccagtgctggcgagaggaggcctatgaggcagaggatggagcaggctgaagccaggggacccaccaacaggaccaaggaccgagacacagacatggaaggacttcagataccatcttattctagagacgtagctgaccaaaaagtaggggaggggctgggtctgcaaattaataaatagaagagggggtaagaccttcctgggaccgcagccgctcagtcctcgttcttctcatgcatgaaggcatccatcttctgggcaaaggtttcagccacaagcagggggaagaccagggaggcgtcagcatagacctgggtaggggggaacctgggtaagccatgggacccacactcatcgtcccagagaccctatgccccacccagccagcgcttaccttgacgggctgtgcatccacccggatcttgccccaggagacagcctcgtctggtcgggcacctgagtcagagccatcaaactcctgggctgtgttgatgtaaacagcgtagtcggccccgttccgctgtggggaggcgggggcacggtgggcccagtcagccagtcacaggagacagacacagagggaggacaccgtagccaaacaggctgagaggtgtgtcccagatgaaggaagcccttcacagacattcgctcccagacagggcccatgtcaatgtctggggtcactagagctgctgggcaacgatggctgtgtttccccagacccaacagccaggtgtcaacaaccctgccccatctgcaaggcaggagctgccagcaactctatcttcagaagccctccaaatccaaccaccgcctgcctcctgatccctgcatggtcaccactgtcctggactggagttctcactcacctgccaccatctgttcaccacatggccaccagggggagcatgggaacccgagtcaagtcctctcccacttctctcagtgcaaaagccaaagccccgcctcagcccacagggcccagcaggctccctgtggcacctccctgcatcacctcctggccctcaccactccaccttcccctcaccaggtacccagctgttcctggattacttcaggcgccccagagcctttgcaatggctgttccctctcctgggaactttgcaatccagaagctcaatgctagtacagcagcacaaactcctggcacgggagacaaccacatagctcctgggagatgcctccccaaacccctgctcccagctcacacttccagaagcctccttccaaaacctcttgttggacagcacccctttctcttctcatgccatcatttagtattccccgtagcaatgactgccccctgacgtggatgtcacttgtttgctatctcccctactagaacatcagtcccggggagcagggatcctggcctgtctagttcatgctgtctacccagcacatggcataggcccaccacacagcatgtctgcagagtgggccgaagcgccacccccactcaccatgaggttggcattggcaatgtggtgcttgaccacgcccccgcccagaatgatcatcccagtgcacttggcaaagatggcctgtgtgttgatgagcctcaggtctgggggaagagcgccgaagtcaggccttggactcagccagccctccttcccctctcctctgtggccctagcgcctcaccctcaacgatgtccaggaccaggcccgggttcttgtaggaatggaagaagatcatgtcgcccagcgagccgtctgtaagtgcgggactaaacacagggatgtggttctgcagagaacatgacaggacagtggctggagctcagagcctcgtctccatgctggctatatgactatctgactgtggatggggtgcctaatttctctaggactgtttcctcaattataagcataacagaaacacctctcacagatgaggcctatatgagaaaacccacagaaaacacttagtatagtgcctggcacataaagaaccagcctattcttagcttgctgagctgtttctctctctttttttttattccctgagacggagtttcactcgttgcccaggctggagtgcaatggcactatctcagctcactgcaacctctgcctcctgggttccagtgattctcctgcttcagcctcccgagtagctaggattacaggcgcatgccactatgcccagctaattttgcattttgtttttttagtagagacagggttccaccatgttggccaggctggtcttgaactcctgacttcaggtgatccacccgcctcagcccccaaagtactgggattacaagcatgagccaccgtgcccggccgtctaattcttttttaaagagccagcttgtggccgggcgcggtggctcacgcttgtaatcccagcactttgggaggccgaggcgggtggatcacctgaggtcaggagctcgacaccagcctgaccaacatggagaaaccctgcctctactaaaaatacaaaattagccaggggtggtggcacatgcctataatcccagctacttgggaacttgatgctgaggcaggagaattgcttgaacccaggaggtagaggttgctgtgagccaagattgcgccattggactctggcctgggtaacaagagcaaaactccgtctcaaaaaaaaaaaaagagccagcttgtgcaacatggtgagttcccatctctacaaaaacaattagccaggcatggtggcacgcacctgtagtcccagctactcagcaggctgaggcaggagaatcgactgagcccagaagctcaagacagcagtgagccattattgtgccattgcactccagcctgggaaacagaatgagaccctgtctcgtaaaaaagaaagagtaagtaggctgggtgtggtggctcacccctgtaatcccagcactttgggaggccaaggcgggtggatcacttgaggtcaggagttcaagaccagcctggccaacatggtgaaaccccatctgtagaaaaatacaaaaattggccgggcatgatggtgggtgcctatagtcccagctactcaggagggtgaggcgggagaatcacttgaacctgggaggtggagggtgcagtgagctgaaatcacaccattacactccagcctgggcgacagagcaagactctgtctcaaaaaaaaaaaaaaaaaaaaaaagactatgtagctttttttttttttttttcaggttctgattctctaattaaagggagtgggtagctcttattttatagcatctgggagtgtgggaccctgagccaggccccaggagagttgctaagtgttgcctctactgttccagagatagtctgggaggagcataaggatgctgaggccccactagttatctgtgtgacttcagacaaaattacctagcctggctgggcacagtggctcacgcctgtaatcccagcactttgggaggccaaggtgggaggactgcctgacgccaggagttcaagaccagcctgggaaacacagggagacccccatctctacaaaaaatttttaaaattagctgggcatgatggcatgtgcctgtggtcccagctactcgagaggctgaggtgggaggactgcttggccccaggaggttgaggctgcaatgagctgtgatcacaccactgcactccagcctaggtgacagagcaagatcctgtctcaaaaaaaaaaaaaattaccacgcctatctgtgtttgagtctcctcatctaagagtgaggatgctgagaataacagtactgaatccccaggaggctggaaagatgaaataagttaacacatgccaaagtctggctactttgctcccgcttaggtcctcaccttctgggcccagtaatacacggactctgggttgttgatctccttgcccagccgggcgatcatcttagaaggcgtccactttacaccctaggagaggatgtgaccttcaggccatgcctcccctgactcccactgaactggcccctccaggttgccccagccccacctctgtgttctgctccatcaccatctggtccagaatgggcatcagccagtcctcaaacttgcagtaattctcattgggcaccagcaggtttccgatcctgagaacaggaggcatgtaggcatcaggccccaggacccttggtccagctcccctgcccaacaccactcagggttctcacctattgatcccgttctcccggagctccttccccctgaggctaaactcgcccaagtatgtgggcgccaggcacttgatgaggtcttcctccacgccgccagctgtggtcaccaatacgtccacctgcagccacaaggcagtgaatttggcccaagaaggaagcccctgccctcattctgggcagaacttctaacctcatccttgtccagtgactcttatgagggagctctgctacaaaacaaaacttgattctattcctctgcttataacagacccctatctgcccatctcacttaaacgatcaataactgcattgcccattgacccagaggccaaggccacggcctcaccaggtccccaccatgttgtgctgcacaaggtagcgaatggtctcacggatgcctgaactgatgaggttggatgtatatcccaggaaaatggtgcagctggtaagtgggcggcggctctgggtcaggtccgcgtgctggtcttcatcctgtgacagtggttccagcttcttctcgatctgtgagtaagggccaagtcaagttaagcactggccttaaatcccagactcaggactccaggtgggctccagaaacagatttcaccccaggccctgcacattcagggatacaggaccagttctacaggggaccaaggaacatctcctgtgtaaactctgccccttcccagaccagatctcaagacacacgttcaggatttgcccccacccttttttttttttttttggacggagtttcactcttgttacccaggctagagtgcaatggcgcgatctcggctcactgcaagctccacctcccgggttcaagcgattctcctgcctcagcctcccgagtagctgggactacaggcgcgcaccaccatgcccggctaattttttgcattttagtagagacggggtttctccatgttggtcaggctggtctcgaactcccgacctcaggtgatccgcccgcctcggcctcccaaaatgctgagattacaggcatgagccaccgtgcccggcctttttttttttttttttttgagacagagtatcgctctgtcaccaggctggagtgcagtggcgcaatctcagctcactgcaacctccacctcgcgggttcaagcgattctcctgcctcagcctcccgagtagctgggactacaggcgcgcaacaccatgcccggctaattttttgcattttagtagagacagggtttcaccatgttggccaggcttgtctcgaactcctcttctcttgatccacccgcctcggcttcccaaaatgctgggattataggcatgcgccaccgcgcccagccagcccccacccttttaggaatcagagagcatctcctttcagatccggtcccttccccgctgggaaaagcaaatctaaattcaagaaccgcccagacttaggctcctcctcccatatcctcccttaatttgtcttgccccaggctccgcccattccagaaagctttaaatgtacctagaacccgcccccacaccaagaatcagtcctcgcctcctcaggttaccgtaccagcatgtaactaccagagtgcaaaatccccttcccaggacagaaactcccgcccagaataggtcccgccttcctccaactattgggcaactcaaataaaagacatatcccctccactggaaacgctgcccccgtctagtaccgcgttggttctacaagccacgcccctccgcgtccctagaaattccgcccggtcctcaccatggcattgacttgctgtacagcgcgcccgaagttggttgcttggaagccggtggtgccgaaggcctccagcagtgcgcggtaattcacaccgcggttgaagtcgtagccccggacctgggtgctttcgggcggcaacgtcgagctgtgctttagcacggcggccagcgcccccgctggcgcctcccgttccagggaaccttccatgcgcctatagccggctctcgagtcaaagctgcccctaggccgggcttacggcggcccagaaacgcgttaaaccccgacgcgcgcgtctccgcaagagcacaggaagtagggaacgtgctttgggcgaaagaccggaagttggtttatcacgtgaccatttttagcccctgtaaaccaggtcgccgccatttttgtgcgtgtgttccgtaatacggaagccgcgaggagcctttaggccctttctttctttttttttttttttttttttttgagacggagtctcgctctgtcacccaggctggagtgcagtggcgcgatctcagctcactgccagctccgctttccgggttcacgctgttctcctgcctcagcctcccgagtagctgggactacaggcgcccaccaccacgcccggctaatttttttgtatttttagtagagacggggtttcacctggtctcgatctcctgacctcgtgattcgcccgcctcggcctcccaaagtgctgggattacaggcgtgacccaccgcgcccggcgcctttaggccttttcttcctttttttttcttttttttttttttgatacagggtttcgctcttgttgcccaggctggagtgcaattgcccgatctcagctcaccacaacctccacattccgggttcaagcgattctcctgcctcagcctcccgagtagctgggactactggcatgcaccgccatgcccggctaattttgtatttttagtagaggcggggtttctccctgttggtcaggctggtctcgaacttccgacctcaggttatccgcccgcctcagcctcccaaagtgctgggattacaggcgtgagccactgcgcttcggcctttacttgttttcatgtgttctcgacttcccatgaatgaagattcttttttatttttattatttatttatttaatttatttttgagacaagagttacacgctcttgttacgcaggctggagtgcggtggtgcaatcttgactcattgcaacctctgcccccctggttcaagcgattctcctgcctcagcctcccgagttgctgggattacagacacccaccaccaggcctggctaattttttatttttagtagagatggcatttcaccatgttggcgaggctggttctgccctcaggtgaccgcccgcctgggctttccaaagtgctgagattacaggtgtgagccaccgtccccagccaaaattcctattttaatgccacctgctggagacccactgcttggcccggcactcgcccattcgtttctgttctgtcccctcgggaggggaggatggttttgttgttgttgttgctgttttgtttgtttgtttgtttgagctagagtcttgcgctgtctcccaggctggagtgcagtggcacgatctcggctcactgcaacctccgcctcccaggttcacgccattcttctgcctcagcctccccagtaactgggactacaggcgccggccaccacgcccggctaatattttgtatttttagtagagacggggtttcaccgtgttagccagggtagtctcgatctcctgacctcgtgatccgcccgcctcagcctcccaaagtgctgggattacaggcatgagccaccgcgcctggcctgctgctattttttgatagggtctcactctgtcgccaggctggagtgctgtgacgcgatctcggcccactgcaacctctgactcccggactcaggtcatcctcccaccccagcattccgactagtgtgcaccatcgtgcccagctaatttttttatgagggtcacttttttttttttttttttttttgagacagagtctcgctctgtcgcccaggctggagtgcagtggcgcaatctcggctcactgcaagctctgcctcccaggttcatgccattctcctgcctcagcctcccgagtaactgggactacaggtgcccgccaccacacccggctaattttttctgtttttagtagagatggggtttcaccgtgttagccaggatggtctcgatctcctgaactcgtgacccgcccgccttggcctcccaaagtgccaggattacaggcgtgagccactgcgcccggccgagggtcacttcttaagcgtcacccatggacaagatttcggtcaccaggcagagttagacacagtttcatccttcctcagccacttttgtctaatgggatagtgagcccggttcgtgccctcacaagtctccaaagccttcacatgctgcataacgctctgttcttccttcccttatagctgcagctgtcacctccacctcctctgggaagccttccctgaactcccactgggtcagtggcctcttctgggacccagggctgacgtctctttccctcctgcaagaatgtgagaccctgggtgtcatctgtatctcaaacacaccctcctaacagtgcatacggccaacaggattattcactcactctacaattcatgtagtctattctctatggtgggctccgtgctaggcactaaggatttagtggtgaacaagaccaagatgtggaccctgccctactggagcccacaatctgattgggaagatagaaagttaacaatagtggtgagtgctatcaggccttttttgttttttgttttttttggagacagagtttcgctcttgttgcccaggctggagtgcaatggcgcgatctccactcatcgcaacctctgcctcccagtttcaagcaattctcctgcctcagcctcccgagtagctgggattacaggcatgagccatcacgcccggctaattcttgtatttttagtagagatggggtttcactatgttggtcaggctagtctcgaactcctgacctcaggtgatctgcctgcctcggcctcccaaagtgctgggattacaggtgtgagccaccgcgcccagcgcaatcaggatttaaacaggataatttgagtctttaggtggaggagttcgggattttagttggagggatgggtgaaggacgccaaggaggtgagatttgagccaaagccagaaggctgagaaaatccccgtatgtgaagatgcagagaggccatttcctgcacatgggaagacagaacagcaaaagccgtgaggctggaatgagcctaccttgttggaggagacagacatcctccttgacatcctcgcttggacctcaaagttgccccctcagctccctctccacctatccctgatctttctgcatctcagcaaacggccccaccctccactcatccactagactgaaaaatagggattggggctgggcgcggtggctcacacctgtaatcccagcactttgggatgccaaggagggcagatcacctgaggttaggagttagagaccagcctggacaacatggcgaaaccccgtctctactaaaaaatacaaaaattagccgggtgtggtggcgcacacccataatcccagctactcaggaggctgaggcaggagaatcacttgaacccgggaggtggaggttgcagtgagctgagatggtgccactgcactccagcctgggcaacagagcgaaactccgtctcaaaaatagataaataaaaattaaaaatgaggagcgcagcttgctgtctccccttttctcacaccccacatccatccttctcagcatgtctgccaacctctacctataaagtaggtccgaaatccaggtgttttctttatccccatagcctgcaagctggctttggtatcctccaacccatctcccacctaacagctaaaatcagagagcttttttttttttttttttttttttgagacggagtcttgctctgtcgcccaggctggagtgtagtggtgtgatttcggctcactacaagctccacctcccgggttcacgccagtctcctgcctcagcctcccaagtagctgggactacaggcgcccgccacacgcccagctaattttttgtatttttagtagagacggggtttcaccatgttagccaggatggtcttgatctcctgacctcgtgatccgcccacctcagcctcccaaagtgctgggattacaggcatgagccaccgtgcccagccgctgagcttttttttttgatgcagggtctcactctgtcaccagggctggagtgcagtgggacaatcacacctcactgcagcttcgacctcctggcctcaagtgatcctcccacttcagcctccccagtagctgggactacaggtgcatgccacagctctttaaccataaatcaaacatgtcactgttaaaacctcctaatggtagcttccccctgggagtaaaatccaagcttttcacagtggccttaaagggcacctctcaacctccctgctgccatctcccaccatgctggccctccctccctctctcctctccagctacacagacctctttgctattcctggaacccaccaagctcttttttgtccaaggagtcaggtacttgccgctccttctgcctagaacaccccatttctcagttccttctcctcctttgggcctaagttcaaatgtcacctcctctgagaggcctgccctgaccactcctctcccctttactttgattttattcttctttcatatgccctttcacatgtatactctttcactgagtacattttctgttgtccatccctgcctaactagaaaggcagctccatgagggcaaggttttgtcttgtttcattgctaatttgggtttttgcacagtgctgggcacatattagaatctcggggcagggctcagtggcttatgcctataattcctttggaaggccaaggcaagaggatcgtttgaggccaggagttcaagaccagcctgggcaacatagtaagaaccatctctacaaaaagttaaaaacataaattagcagggcacggtggctcacgcctataattctagctaatcaggaggctgagttgagaggatcacttgagcccaggagtttgaagttacagtgagctatgattgtaccactgcactccagcctggacgacagagcgagaacctgggcttaaaaaaagaaaagaaggccaggcacgatggctcacacctgtaatcccagcactttgggaggccgaagcaggtggatcacttgaggtcaggagttcgagaccagcctggccaacatggtgaaaccccttctctactaaaaatacaaaaattagccaggtgtggccgggcgcagtggctcatgcctgtaatcccagcactttgggaggctgaggcaagtggatcacctgagatcaggagttcaagaccagcctgaccaacatggtgaaacctcatctctactaaaaatacaaaaaattagccgagcatggtggcacatgcctgtaatcccagctactcgagaggctgaggcagaagaatcgcttgaacccagaaggcggaggttgcagtgagccgaaatcacgctattgcactctagcctgggcaacaagagcgaaataccatctcaaaaaaaaaaaaaaaaaaaaaattagccgggtgtggtagcatacgcctgtaatcccagctactcaggaggctgaggcaggagaatcacttgagcccgggaggtggaggttgaaagtgagctgagatcgcaccactgcactccaacatgggtgatagagcaagactctctctcaaaaaaaaaaaaaaaaaaaaaaaaaagaacgaaggcattggagatttgagcctgagcagtggcgacaacaggaggagaggcaaggctgcatgttggagatggcagaggctgacaaagcagatgtgttgggaacagttagcaggagatccagcaggccagggggaggccagggcctcctcactcccccagccaaggcacctagcccacagggacccaggtgacacatgacaccagaggagccacagggcctcctggggcagggaccccctcagccgaggcagcagctgctgctgcagctggtgacatttcactccatgagagccctggcttcaaagtctttgcaggggtagccgagggagaaaagggggttgaagaggacaggctgggttggggagggagccacagcagggtggccaccagaggaccaggcagccagaggtgacttgggccggagcccttagccgaggtgtgtgggcctgatgggtccaggagcagccaccctcatcctgcagcccccaaggaacatagaaggaggtgtgggaaccctcgggcagccctaggctccccctaggggactgaggttgggcctgctgcccacggcctgcccactttacccagatgtccagcaaggtggccatcaacagtgacattgggcaggccctctgggcagtggagcagctccagatggaggcaggcatcgaccaagtgaaggtgagggtcggggccagtgcaggaggcgggaagaggtgggaacacatgggccaggggacaggtgcatgcctgggtctggtctggctgaaccagttggtctgcaggtgtccaaagatggccgccgatctgctgaagttctgcacggagcaggccaagaatgaccccttccttgtgggcatcccggccgccaccaactccttcaaggagaagaagccctatgccatcctatgaacccagggcaatgccaccctgtggcctgggcaaaccagggggcctcaataaacatgaagtgaatacttctcagggcatggctgagctgggctgagatgggagaccagagggactttgggcttgcaggggccaggtgcgtacctggcccagcctccctccctgcctgcccccggggtcacagccacagcagcacacacacaccctggagccccagacggagagcacgccatccctcttgccctcgccagcacccatgggatagcctgagcaggtaccctttcccaccgtgcagacaaatggccaggatttgagtcataatctatacaccacacgcgtcacacatcacacacacacgtgacatcatagacacagatgcccacgatcctcaggactctccctcttcaaatgcacagcaacagctgacatgcacccccagcccagacttgctatctctcccagtcactcccatgcaggcccgcagccccacagccccaagcaggcacaggcagaaccccagcaggcaaaccacactcacactccaggcccaagcaccaacatgtcaggtttatttctccttcgctctcaactgagagcggggcatccaaatcataacaaaaccagggcccaagagtgggaagcggccccctgggtgggcctgaaccccaatttcacccttcccccgggcatagggcccaggccaggacgctcacccgaatgtggctgggactccttgtgccctaggcccacggggcggaggcagcaccaacattggggatggtcccccaagaacagaggaggaagcccagcctccggcaggcagtatccacatccacgcccacctgctcaggcctgcagcctccagacctctagcgacaggtctccagagccggccaccaccaggttgccctcagcacagacctgggaagggggaggaacatgaggagtcagggacgatggcgctctggccagctgggcagggcacatggggcaggaccttaccctattgagcccattgtcatgccttcgggtgcaaatggtccttggtgggtctgtgggcacgtgcacctagtgaggggcaatgggcgaggtcaagaggtgtgcccctggctgatggaggtaggggagaggcagggactgtcctggggtgggggctgggcaggagcctcacccggatggtcttgtcagtggatgtggtgtacaaggctcccacggagtactggatcccagtgatgggaaagctgtggcccacatcaaaggactgcaggaggaggatcaggcaacactcagtcgaggctctcccaaggcccgccctcccccacaccaccaggggctcgggtaggaaggaagcccggggggagggacagtcaggggcaggagctccagcagacccggataagctggaagcagccgttgcggttggcgaagacgtgcagcaggccctggttgtcaccagcccagagctggggttcctggtaggacatgcagagcaggtaggagtccagctacgagagggacaagggacgggacagctcaggccgggctgggcctgcaacagtccccatccctccaggcccctggggagggcccacctgcagacgctgcaggacgctgttggctcggcggtccaccaccaccagggtgtggtcctcgctgcctgagatgatgtgccggtcatccgccagcagggtcagcacgggtctggagtgtagttgctggtgcttcaacagggctgggccggcttcatgggtgatgggccggtgaggagggatatcagagcccctcgaaggccccccccagcccatgagagcatcccgggtctccatcctgtctggcaaaaccctcgatctgctcattcccccaccccacagagtgacccatctctcctctcccgcctcaggtaaatccaggcttccacaggagccccaggcctctgcccatccccgtccacatcccatatccctcctccgatcccatctactgttcttagcacagagctgaccaaggtggtctcagtcttgcatccaccctcaggttggcctgaaacatgcctatcccgcagccccgctccagctctgcctggacaaggtacactggcccttcaattaacaaaagtagaatgaataaataggccaggcacagtggctcacacctgtaatctcagaattttgggaggctgatatgggcagatcatccgagcccaggagttcaagatcaccttgggcaacgtggcaagaccccgttctccatttaaaaaaaagaaaaatggccgggcgcggtggctcacatctgtaatccctgcactttgggaagctgaggtgggtggatcacctgaggtcaggagttcatgaccagcctggccaacatggtgaaaccttgtctctactgcctcagcctctggagtagctgggactacaggtaggcgccaccacatccagcataaaaaaacgtagttaatccaccactgttcctattatcatcttcccccattaaccccatggggctgctgtggtattattatctggatttcaaagatggggaaaccgaggttcaagcttgtctggaggtcacacagctaggcagtgggacagccagaactctaacccgcccccagggctgcccaagcttcaccttcacccgctgcccaagttgcctgtattgtaccagcacagcatggccactctgagtggtgagtatttggttaagtgactatgaccccagccaggctgtgaagccccagtgtctccttccctaacatgacatctcccaacctgggccccaggacccttggcccacctctggggtcgtagatggtcaccttcttgtcataggtgccagtcaccaggatgtcaggcaggtaggagaggcacagcacggctgagctggccctagggacacacagaccacagggctttggctgtggccagacagggtcctatccccgcaggccccctgcccaggcccccacacactttatctcgccgaactgctgcccatccgctgccatgtcccagagcttcactgtgctgtcccaggagccggagcacacgcggtggtcctgcgctgccagtgaccacacccagccctgcaggacaggagcagcagtcacacacctgccacagcccatgggggtcccagactgggatcgttctgtttttgcaggtaaggctcagagaggtcaagagactcacccaaagccacatagctcttcctccccagtgcccatggtgatagatgctgcagcaagtacaacacccaactctggctccaggtgatcacccccattgcatagatgaaaccagagcaagttcaagttgagtacagattaaagtttgtgtccatgggtcagcctgacttcagagtccaggaaaggcacaccccacccagaaactttttttttttggagacggagtttcacttttgtcatccaggctggagtgcagtggcttgatcttggctcactgcaacctctgcctcccgtgttcaagtgattctcctgcctcagcctctctagtagctgggattacacgcttgtgccaccacgcccggctaatttttgtattattagtagagacggggtttcaccatgttggccacgctggtctcaaactcctgaccttaggtgatccgcccgcttcagcctcccaaagtgctgggattacaggcatgtgccactgtgcctggcccaggaactctttttttttttttgagacaaggtcttgctgtgtcatccaggcatgaatgcagtggtgcgatcatggcttattgcagcctccacatcccaggctcaagcaatccttgtaccacagcttcccaaagagctgggactacaggtgcatgccactacactctgctaattttttttttttttttttgagatggagttttgctcctgttgcccaggctggagtgcaatgatacgatctcggctcaccacaacctccgcctcccgagttcaagcaattctcctgcctcagcctccctagtagctgggattacaggcatgtgccaccgcgccagctaattttgtatttttagtagagccggggtttctccatgttggtcaggctggtctcgaactcctgacctcagatgatccgcctgccttagcctcccaaagtgctgggattacaggcgtgagccactgcatccggtcttttttttttttttgagacatagtatcgctctgtcgcccaggctggagtgcagtggcatgatctcggctcactgcaagctccgcctcccgggttcatgccattctcctgcctcggcctcccgagtcgctgggactacaggtgcccacgcaccacgcctggctaattatttggtattttttgtagagtcagggtctcccatgttgcccaggctggtctcgaactcctgggttcaagcaatcctcctgcctcggcctcccaaagtgttaggattacaggcctgagcaactaactgcaccctggcccaataacatttctaagtcaagttctgcaagaactcagcaccagtggtggtttgaagccacatgacaagtgattaagagtgtggcctctactttgtgacctggcaaaccatatcacctccctcagttcattcatcagcaaattgggcagaaaacatcccttgcctcaggagctaatatgcacagggtgctgaatgctgactttttgcccaccaatcccgctgaggagggcaatattgtgtatctcattttacaaatggggaaactgggccccagagaggttgagtttctcactcaaggtcacacagccaggaagcagcacagtgagaatttgaacccagcatcctggccccaagcccaagctctcagctaccggcctgaccaccttagcgactggtggagatgctcctccacagccacctctcacgagatgacagtcatgctcagagttggctgatctccaagggtagtctcataactgctttacactgggcctctcaaggtgtacctgacgtctattgagcacctactgtgtgtcaaagcctgagcttggctgggcaccgtggctcatgcctgtaatcctagcattttggaaggctgagtcaggcagatcacttgaggccaggagtttgagaccagcctggccaacatggcgaaacctcgtctctactaaaggaaaaaaaaaaaaaaaaaaaaaaaaaaaaatatatatatatatatatatatatatatatatacacacacacacacacacacacacacacacacacacacacacacacaaaagaaattagctgggcatggtggcacatgcctataattccagctactcaggaggcaaggttgcagtgagctgagattgtgccactgcactatagcctgagcaacagagtgagattccattaaaaaaaaaaaattagctgggcatggtggcaggcacctgtaatcccagttacttgggaggctgagacaggagaatcacttgaatcccggaggcagaggttgcagtgggccgagatcatgccattgcattccagcctgggtgacagagggagactctgtctcaataaaaatataaataaataaaggccaggtgactcatgcctgtaatcccagcactttgggaggctgaggcgggcagaccacgaggtctggagatcgagaccatcctgaccaacatggtgaaaccctgtctctaccaaaaataaaaaaattagctgggcatggtggtcctagctactcaggaggctgaggcaggagaattgcttaaacctgggaggcagaggttgcagtgagccgagattgcatcactacactccagcctagcaacagagtgagactccatctcaaaaaaaaaaaaaaaaaattagacaggtgtggtggcatgcacctgtagtcccagctactcaggaggctgaggcaggagaaccgcttgaacccgggaagcagaggttgcagtgagctgagatcatgccacactccagcctgggtgacagaacgagactccgtctcaaaaaaaaaaaaaaaaaaagcctgagcttaatgcatgtccacattaatgcataatgcatctccttcatcctcatcctaatcacccactggacagaagtagaaactgaggcacagagaagtcacacatctcactcaaagtcacaccaaggttagaaaagtcagattcaaatctatgcggtcctgtaccaaaacctggggccttaaccaagatgccctactcaggcctcatacctcctatccccacctgactcctcacctcatgggtactatttcgcttagtgcctaaggtcttgatcagaacctggttggactccgtccccagctgccgcaggtcccacaagttgacgttgcgatctcgggagcccgacagacagagtgacccaccctggaaagggagcaaggtgatgttgtcagggccaccctggcccaccctgcctggccccccacagaccccgtctcacctggagcagcagcactgagtcaacggaagccacgtggccttcggccaggcagaagtattcgacccagcgcccatcctctgcccagcgggacaggtgctgctccagcgcaatgcaggctgccggccagtcaaagttcttctctgtgggttaccacgagtagggtgcccagtgggcagggaccctagcacccatgccagctggccaagcccaaccctggcttccagggagcccacactacaccagacttggacagaaccccatggagatccctactcccaccccaagccgacccaggctgtggtcttgggaccacctgcctgcccatttcccaggcaggtctaggactactcactccaatttccagaaattgggaactggggtctcagaactacctctccaggcgccatcccccaacccaaactcagggcagagcagtctcaggatgttgaggtctgacctcaggctcagcatagaagctgggacctcatgactaacccttcctgcctcagccatctgaaccagaccaagggggctgtttctcaaacagtatctggaaaccagggagccttgtcaagatgcagaatgcaagccccagatgcagattctgtgatatggacggggtccaagcatctatgtttattaagctgtttgggagagtctgacctgggggttggatggcaacaccttgagaatcactgatcccggagtgatcctgattcctctctaagcagaatcaaagcttccaggttaagggtatcaaacacccaagctgtaatacatcttggcttaagggcctgaggatccagctgtatcaggatcaacaatatcgattcaaaggtcccaagctgtcttccctcaggaaccaatcaactcagggccaagagccactgtctcacccctaactgggtcaaggctctagggctcaggagttttgacatcaacaggtgctgtctcagcttctaagctggactcagaacctgaggatccttgggctcactttgagccccagcataaactccagagcctaagacttcaagtccctgtgtcaatccccaatcaggggtcagtggcttagtaccacaagaccccaagactgaggatatttggatcctgagtcgtccaggaaccacagccccatgttagggtttcacagcctcaggaccccaagtgcctgactgcctcgtggtccacccagaggtcctcaggggcttcggcaccaccagtaactaccttagcctccagcctgagccaggacagccacgaagcctgcaccagaggctgcatccggaacaccccatgtacctcttccccgccccaagcctgacctgggcgggcgcccccggcccccggtccccggcccccggccccgcgcaccttccaccactgggtagggcgcgcgtacgcggcgtagcgcgcgtagcctccaggtgacatggtcagacacgaggtcgcggagcgcgtggcacacccgcgacaggacgtggagcacgaggcgggcgtccaggtaggagcagatctcgagcagcagctccgggggaaggctcagaaggcccggctcacttacggccgaaaccctggacgcggcccgaggctccgaagcgctcggggacgcggcgggtgtggatagctgcgaggggcgcgagaacgccagcccggattttggcggactgagaacgcgggccacgtaggccttggcctgcgcgtctgggtctgtctctgactctgggtccgagtcatcgtcccaggtgcgggaatcatcgcaccgccctaggggaagctccattgcgaccgggtgggcgctgccggcctcgcgtcttgtctcctaggcagcacgagggcacttccggcgctgtctgatgacgtttatgcgcccaccggaagcgacgaagtcagacactggcttaatacagaacatcgccccgcttacagggtctcttgcaactgcgtcggccttaggctggaaaatgcaggttcctgtttctgcgctttttaaactagccgataccgagagccagccaactctagctaaaaacgaaactcaagccaggcggggtggcgcgcgcctgtagttccagatactcaggaaggtgaaggggtaggatcccttgagtccaggagttcgagactgcagtgagccatggttgtgccactgtactccaacctgcgcaacatagtgagaccctgtctctttaaattagacataaaataaacactgctttaacgaaggcatctgttatatgtgacactgagcttagaaacccaaaggcccctttccgagttcaaggagtagagattggaactcttgcctcttttcccagagccagaaatatgcagttacactgcagaggcatcagttaagtgactttttttttttttttttttttttttgagaaaggaactggggcctcagaactacctctccagaccccattccccaacccaaccttggaggacagcagttcagtcctccaagcggagtgcttggctcattgcaacctccgctttctggactcaagtgatcctccacctcggccccccaggtagctgggactacaggcgcgcaccaccacacccggctaatttttgtattcttttgtaaagacagggtttcactacgttgtccaggctggtctggaactcctgagctcaagccatccgcccccaacttggtctcccaaagtaccaggattacaggcgtgaaccatcgcgcctggtggaaagctacctttttcttttttctgagacggagtctcactctgtcacccaggctggtgtgcagtggcgcgatctcggctggctgcaacctccgcctcccgggttcaagcgattctcctgcctcagcctctagagtagctgggaatacaggcacgcgccaccactcctggctaatttttgtatttttcagtagagacggggtcgcactatgttggccaggctggtctcaaactcctgacctcgtgatccgcccgcctcagcctcccgaagtgatgggatgacaggcgtgagccactgcgcccggcctaacatcacacttactaaaacagcatgttggccgggtgcggtggctcaggcctgtaatcccaccacttcgagaggcaaggtgggttaatcacttgaggtcaggagttcaagaccagcctggccaacaaggtgaaaccccttcctactaaaaatacaaagaattggccgggtgtggtggcaggcacctgtaatctcagctgctcagaggctgaggcaggagaatcacttgagcctgggaggcggaggttgcagtgagccgagatggcatcattgcactccagcttgggcaacaagagcaaaactccgtctcaaacaaaaaaactgcaggtatttactgcaagcctcttttgagccaggcagctaaccaatccacgtaggtcatctgcgcagtccttgctgtttgctctacttgacactcttctctccatggctctgttcaaacatcgtcttctcagtgtggcctttgcaggtcaccctacataagatttcaaccgtttcccccaccattctctctgccttcctgtttttctctataggacttagcacagttccactttttatactctatcctctcactagaatgcaggacttatttgttgaatattggatgtgtgtcagtatttttaaattttcccacgttggtctttgggccacaccaaggttgcagtaagattttattttggctgggggcggtggcccacacctgtaatcccagcactttgggaggctaaagtaggtggattgcttgagcccaggagttcaagaccagcctcagcaacatagcgaaaaccccctctacaaaaaatacaaaaattagccagcatggtggcatgcacctgtagtcccagctacttgggtggctgaggtgggaggactggttgagccagggaggttgaggttgcactgagccatgattgcgccactgcactccagcctgggtgacggagcaagacccggtctcaaaaaaaagaaagattttattctgaagattgtggtttccccccacagctgaaactacttctcatttgcctgagtaattgtaactaatattaattaaattaccctcggcctggggctgggctgaaccttctatgaaaaccttgacccagggtcagctgatgataagagtgcggcaaggcctcaccccttaccactcagtttagagtacggcagaggggcatcttgaacctgggctgtgacactaatggctcacccttagtgagctgaagtcccagagaatgagctgcacatttcatatatgttacaaatttaatcttccatctttcacattcgtctatcttcccactctcaagtatccccggtgcccccgacatttcttcactaccaaagccaaggacacaggaagccacagactaaggagttcacaagaaactgatctttactcaacaaagttctacacaagtggaatctcacgccacctcggcgccaatccccagcacagcacagtaacaaatggacagacccgggagcccgcagggggaagagggtgaggagggaaagagggactgtggctcaaggccagtctgggtccacagccctgggtaggggagaaggttgagaagctgaaacttcattgtgcaaaaaacaaccaaaaataaattaaaaaattaaatagtttttttttaaaaaaaaaaaaaaaaaggaaaacgagaagaaccaggctccccttccctgaaggtgtttgtatccccccatcttgagtagcgaggggttaccaatcccatcagacagccaatccatccacacaccccaagacccagcagaggatgcttcaaagaactggaattaccagaaaattaaaaggtatttttaaaacttttttttttttttttaacaaatggcttccagagacctgctcgagtttcatggggtgggcgtgcagggacacccagctaatttatggaatgtgtactgagtgccccttggaatagatgcagggcctgaccctgactatggaaagacacagggcttggatggagggtctggcgcccaggagggatggatggagcaggccccaggatgcgagactccagtcagactccaaaacacaaggggctccccaaagaagtagaaagcagggaaggaaaaaaagggaaaaaatgctaagggggtctgcaaggcccagttttctggccaactgggaagtaactacacccccaccctctctaggggagccccttccaccttgaccatgttcccagactattccggaaggttctctagaattgctgacccagtctagtaggatctctgggctcactgggtactatgatgagcaggaagtcccagggagatggaatagggaacaggggacacaccacctttcccttccaccaagccttggttttcctttttgctggcaaaaacctgtgtcctctgtcatcatcaattaaacgcccctgccccaggccttgagttaaaactggggcctgaaacgtgagaagggggtttcagaagcacagagaaacggactgcccctgaagctgcttacagagagagatgctcggggtaggtgccagtagctctggctacacccagctctcttcaggaaaaaggtcccaacccagtgtcttcaaaagccactggagcacacaggaaggagaaacggtgacctctggccagccccagccactccagtggttctcaccctgcgagctaggctaggataaggacggagacaccaccagctgaggctgcaacaaagctggcagggagtgtgtggagtgggtcccaagcatgtgcgtgctgacagggcgactcccaaggtcaccatcctcctccccccgccccgagatcccgcctgaggccccccacccacccagccctccccagtcaccgccaattccggcaaaacagcagaagcttcttaaactctagatgcaggttacacggaaggccttacgggttaactcaggggttcactaattctactgtctccatgcagtcggggaaatggtggagcggctggcccagcctcgccggttatggcacccgcacatgcgtgtggccatgtgtgtccgtgtgagtgtacgcgtccctacgagggcccccctcctgacctgctcctccctcacctcatccgaagccggattcggtcagctgtgtaattcctccctcccacgtagctggcccaagtgggctgccagagatgaccctattagagcccaggggcccttgcccaccagaagtcccccccacctccccgtttgtaggatgagcatggtggccccacccacctgccaggagggcaagtggacggatggacggacggacggacggacggggaaggcatctggatttgagtcccactcactcctccctaacccccctcaaccagggcacagcgacttccggatgcagcgcactccccagtaatccctccgacgacgacgcagacagaaacctgcagggggaggaggaaggtcatggcctgggacctttcggcccccaagacagtgctgacttgccagctgcagtctccttacctggcagtctccatgatcacctagaccccatagaaagccgccagcctctccttgagcagcggcgggaattgctcagagaactgctgccagttatcttccccaacttggtctttgaagccgtggagaatctgtggggagggtggtggtgaggggtaggcaggggcagaacaaggggagtgcgcctcttcccccatccccaggccccattgttaccagatggtctcacccctgcctgctcccggaactagatcagggcccagacagagcctcaccttataaaacatgtcccgaaggtcatccttcgggctcacccaggaggctacagcatcgcagaagaaaataaagtcctgaaacgtgacggatcccaggtgaggggccgcccgagcccagcgcccgcgcctgccctcagagcccagctgccccaacctgcacaacgccccccgggttgacaccgatcatcatgcagatgccgcggaaggctgagtccttctcctcgttgtccctgatgttcctgagggacgtgcacctgtgggaaggtgagcagctggaggtcagagggcaggctgggcatgcatctgtggagggctgggtcactggggatcagtgagtgggcctgggacatgcatctgtgggggtggggcagggcagggagtcagtaggcagatggggctggaaatgcacaggcgagggagggggttgggccagtcccgcccaccacacagcaggcttgacacgtggacacacaccaaggccggatgaactgctgcagcatgggtgccacctcctgggggcacacgtagcccaagcggccgatggtgatggctggaatggcagagggactcgtcaggcgacctgcaaccccgagcggccccgggacggtacgtggcggggcctctggcacaaggcaccaagccccgccccatgagccccaagggaatggctactgcagccaccctggtcccccaagcttggcccagccaggggtcctcctcatcacacctgagtcacttcccaggtctctctgcatctatctttctttctttcctttccctttcctttttgtttttttttgttttgttttgtttttgagatggagtcttgctctgttgcccaggctggagtgcagtggcatgatcttggctcattgcaacctgcctcagcctcccgagtagctgggattgcaggcacgtgccattacccccggctaatttttgtattttttagtagagatggggtttcaccatgttggccaggctggtctcgaactcctgacttcaggtgatctgcctcccaaagtgctgagattacaggcatgagccactgcacccagcctgaggctgcatctttcttggggcttctcccagtgaccccttccaggtacttccagacaccctccttggttccttgacaaggctctttctgatgcccttcccagcccagaaccccacctccagaaggcaggcaggggtgcaggcagcagccgggccaggtgcccacctgtgttttccagcagtgtcttgggtgtgttgggtcggttaatgatttccaccaggttgttgaggaccatctgcacataaggctgcatctctgcccctgggggagcacccagtcagagccctgcacagcccccgccacccacaggggccagggggccgccccacctcactcactactcgccccagttccaactagagactggccaaccactaccagtgaggaaacaaaagaccttctccggctaatccccacccagaatccctggccaaccagggacagacccacaccctccaaacaacagaggcttctctggagtcgctaaggtgacaacacgctgcccaagtcaaaggaaaaaaaaagccaaagtcacccaaccaatccgaatgagtcttttagccaactacacaaaacggtccaatcagaacagccctcctatccctcctctttagagaagccaatcacaaatgacctttctgcttggctccacccctgacgacccccaagagacttgccttgaaggaagctgtcagtcagagctaggctcccgcccccaggttgagaacaggctaatggggggcgcgtgttgccacttgcagggcactcacccatctgcatgcagatttcaccaatggcccaggtggcgttgttgcagacggagatgaactctgggttcaggttggtgcccagaatgggcatgaactcggctggtggggagaaacaggggtgctgagaaggagggccagccagggtaagctgcaggacctagtccagcaggccccatcagacagtacgaatacatcccaatgtggtcacagtcatccccgggtattgctctccatcacttgaggccggggctggggtcatgggttagggacaaggcgagtgtcgtaccgatacagggcttgacatggatgaagcaggctttggtgaggtctcccaggagggcaaaggagctctgccggacctcaggcatcgagtcctggggattcaagtaagatcagtgtggctaggctcccctccttctaaccaggacagctcagggggcacagtccctggtgcatgtccagcctctgccactttccagttctagagctcctagctgttccttaacctccctagcctccagcccacatctgcaaatgggagatggcagtgccccaacggtcatccctcagtgtccgtgggggattctttccaggtccctgcagatataaaaatccacggatgtgcaagtccttgatataaagtggcacagtgttagggccaggcgcagtggttcatgcctgtaatctccagcactttggcaggccgaggcaggcagatcacttgaggtcaggagtttgagaccagcctggccaacatggcaaaaccctgtctttactaaaaatacaataaaattagccaggcatagtgggacacgcctgtagtcccagcttcttgagaggctaaggcaggagaactgcttgaaccctggaggtgaaggttgcagtgagccgagatcacaccattgcactccagcctgggtgacagagtgagactctgtctcaaaaaacaggtggggggcggtggggggggcatagtgtttgcatatgcacctatgcacattctcctgtacacttagcatcatctctaaatcacttatatctaatacaatgtcaacagtatgggaatagttgttatactgtattgtttagggaataataacaagaacaaacttctgtatgcgttcagtacagatgtaatttttcctctgagtattttcaatctgaggttacttgaatcttgggatgtagaacccacagatacagagagccaactgtgctggggcagggacttgggctttcacattttctattttcttttctttctttttttttgaagacagagtctcagtttattgcccaggctggagtgcagtggcatgatctcagctcactgcaacctctgcctcctgggttcaagcaattctcctgcctcagccttccaagtagctgggattacaggcgcctaccaccatgcctggctaatttttgtatttttcgtagagacaggatttcaccgtgttggccaagctgctctcaaactcctgacctcaagtgattcacctgccacagcctcccaaagtgctggattataggcgtgagcacctggcctcacattttctattttcaatactgtttgctttaaaaaaaatttttttttttaattttagaactggggtttcactatgttgcccaggctggtctcaaactcctgggctcaagcaatcctgcctcggcctccaggattactctttaaaataattagaacagcaccttttccctgatttcctttgggcacaaccaggccctgactccccaccaggggcagcccacgcaggctgctgggtgtcatcactgtccagggtccccacccacctgcatgcactggaacagcaatgtcatgatgttgctgcgggccaccagctgctccacgtgaccacccaggccctcggccaggccgctgagcagatccagtgctacgatcatgaagtccttgtcgggagcctcatactgctcagggtgctgggtgtacatctagacacagatgccgacaggggcacgggtaagtggagcaggcccgaggcaggccaatgcagaagcacaggtgacgggcctagggttgctcaccatggcctgagccagtgtcttctgcaccagggtgacacagcgctggtagacgggctcacagtaaggcaggaagccactctgcagggcggtggccaccgatgacagacactggcagggaggaaggcaggtggggagaactcaggcagggtgggcaggatgggtttcgggtgaggggcaggagcccactcacctccagcagggggaagaggtccttgtcttcgtccttgagctcattccacttctggatcagtgggggcatcagcttctggatgtattcctggagagggagcacgaaatgggcgctccctgggtcggggtggcagactgtgactcaggtacctgttgcccgagtgatgaggcctgagcgcctcaccgtggctcatgggaccctgaaaggcctgccatctggccagacctcgaggccttcattcttctcacctgtccaagcaccgcccgccccaccccaccccccgggagcctgggttaccacctcctggttcccgaagcacagcacttaccacgctgtctcataactgtctttctcccccactagactgggagcagggcgagggcggggccgggtctgtctgtctgcctgtcgaggtcacggccacgtccctggcgtgcaacacggggttgccaccaggtcactggatgcccaggggcacggggatcgggaggcgggagccgctctggggtctcaccggctggttgaggtggtggcctacagagtcggccagggtgccaatggcgtcatagaggatgagcaggttcttgtgctggtatttcccaaaggcaaagacaagggtgtccaggatgtagctgaggtagggcaccagctccgtgcaggcctcttcctccagggtggcaaaagcactggtgggagggaggatgaagcgggggctcagtggaccatggcaggtgacactgggccatgggcagttggggagggcaactcaggatcagccagtacgaatacgcgataaatcagttccacatcaacagtcacaggtgtcatcacttcccagagggtggccgggggagagtgggggctgtgggatcaggggtccagggtcacctgcaggccgcctcctgtaccctcttgttgccatccaggatgcgtttgagcagctctgtcatcaggggcttgaggtgcatgtcgggtggctggctgaccacccagtgggcatagcggctcagcgtccagcaggcgatggagcggaccaaggccttcttatccgacaggcactggatcaggtgcgggatcagctcaggcaggtagggcaccatgccctgcatgcagcctacaaggaaagggaaccaagagggggcagtttgattgggcccagccacacccaccgtatggagagaagagtcagccgcacacaacatatagggaaactgaggcttagagtttaaatcactggcccagactcatttcacagagccaggtaaaggcaggcacaggaggggaaacaacagaagcctctcatcccaaagccccgggttatctttatttttttttgaggcagagtctcgctctgtcgcccaggctggggcgcagtggtacgatcatggctcaccgcaaccttcacctcctggttcaaacaattctcctgcctcagcctcccaagtagctgggattacaggcctctgccacaatgcccggggaattttttatattttcagtagagacagggttttaccatgttgaccaagatggtctcagtctcctgacctcgtgatccacccgccctggcctcccaaagtgctgggattacaggcgtgagccaccgcgcccagccaaagagctccgtgttattgcgttaattcaattcatgcattaattcatgtgttaattgaattcatgtgttaattcaaaattggctccgttacatagtgagtggggttttatggggcagcagtgacccaaatggaataaaagcactttgcatttgaaacagttcttaagatgtttgtgagttttcttttttttttttttttttttttttttttgagatggagtcttgctctgttgcccaggctagagtgcagtggtgtgatctgggctcactgcagcctctgcctcccgggttcaagtgatttcctgcctaagcctcccaagtagctgggactgcaggcgcccgccaccatacccaactaatttttatatttttagtagagacggggttttaccatgttggctagactggtcttaaaatcccgacctcacgtgatcccacctcagcctcccagagtgctgcgattataggtgtctggccgtttatgattgttctatttctccttatttttgtttaattttttaatttattattattatttttttgagacggagtcttgctctgttgcccaagctgaagtacagttgcacaatcttggctcactgcaacctccgcctccctgattcaagcaattttcctgcctcaacctccccagtagctgggactacaggcgtgggccaccacgtgtggctaatttttcatatttttagcagagacgaagtttcaccgtgttagccaggctggtctcgaactcctgacctcagttgattcaaccgcctcggcctcccaaagtgctgggattacaggcgtgagccactgtgcccagccatttttaacaattttttaatgttttctttgagacagagtctcgctctgtcccccaaggaggagtgcagtggtgtgatctccactcactgcaacctctgcctcccaggttcaagtgattgtcgtgcctcagcctcccaatagctaggactacaggtatgcaccaccacacctggctaatttttgtatttttagcagagatggggttttgccatgttggccatgctggtcttgaacccctggcatcaggtgatccacccgccttggcctcccagagtgctgggattacaggcttaagccaccacacccagggtttttttttttttttaaaatatcacgaactctgctcttttatttaaagagaacaaagataatagcacattgccaataatccaagacacaagatctatgtttaccagtttgagctcaactcctatagatctttttaccataaacatgtaatacaggccgggtgcggtggctcacgcctgtaatcccagcactctgggaagctgaggcagatggatcacctgaggtcaggagttcgaaaccagcttgaccaacacagtgaaagaaaccccgtctctgctaaaaatacaaaaatcagccaggtgcggtggtggacacctgtaattccaactacttgggaggctgaggcaggagaatctctggaactcgggaggcagaggttgcagtgagtcaagattgcgccattgcactccagcctggacagtaagagcaaaactccgtctcaaaaaaaaagaaattagccaggcctggtggtgaattcctgcaatcccaagctactctggaggctgaggcaggagaattgcttgaacccgggaggcagaatgttgttgcagtgagccaagatcacaccactgcactccagcctgggcgataagagggagactccatctcaaaaaaaaaagaaaaaaaaaagaggccaggcgtggtggctggctgggcaaggtggctcacacccgtaatcccagcactttgggaggccaaggcaggcagatcatgaggtcaggagatagagaccatcctggccaacgtggtgaaaccctgtctctactaaaaatacaaaaaaattagctgggcgtggtggcatgcacctgtagtcccagctactcaggaggctgaggcaggagaatcacttgaacctggaaggcggaggttgcagtgagccaagatcatgccactgcaccccagcctggcgagaaagcaagactcagtctcaaataaataaataaataacacagcttatgtaatctattaacatatgtaagcgtattgtgtgatatataccctattaacatgagatatgagatacattaaacacatattacatgtcgaaacatttctttagacaatttttttttgagacagggtctcagtctgttctccatgctggaacgcagtggcgcaatcatggctcactgcagccttgacctctcacctcagcctcccagttagttgggactataggcacttaccaccacgccggctaattttatcaggttttttttttttttttttttggtagatatgaggtctcactatattgcccaggctggtcttgaacacctgggctcaaacgatctgcctgcctcagcctcccaaagtgctaggattacaggcatgagccaccacacctggcctttttaaaaaattttttgtagaaagagggtttccctatgttgcccaggctggtctcggactcctgggctaaagcagttgtcctgcttcagcctcctgagtagctgggattacaggcgtgcaccacagtaactagacaaattttagacaaattttgaaagcttacaaggttgagggtttttgctgccatgcctgaaatttttggcacaggtctggatgctgaggcaatggtatatgatgcctccaacggactcacaaagccctcctgtaacaagttttatgtcccaccgggaccatgggagcctgaaaaccccaccgattacagaacaccaggttgaatttgatgaaacaccacctaccacgggttactactgactctggcaggccagcccggcagccaggaacaggtttaaggcccagacacaccctgagtgactgtaaggaagtggcatcaatctttctgtacctcagtttccccatcttcgaaactgggatccggcacccagctcatcaggtggtggtgagggccaaggatgtttgtctacataagtgcacgaggcaagcatgcagctgtgcctgctgttattatcattgttgctgtaattatgcttacaacatgaaagaactacctgcctgcaagaatgaacaagaggccttgcactgtggggctccaggggttcctttcaggcccaggaaccaaggggagaattgagatctcagagctgtttggagtggggtgagtaggcctccagggagaactgaggcattggtgtggctagtaatgtgggccagccctacagtctcatgccagcacagggctcagagatcaggcgcactcaccctcagcaatggcgcccagcaccaggatgcccgactccttgaccacccactcggggtggaagaggaggcctttgagtagtgggagtaggtggggcagcagttcctcccggaagacattggcgaggacgtccagtgcagccgctgagcacttccctggggaagggggaacaatggggaggctcagggcggcccctcaggcaggtggccgaccctccttgactgcactcccaggatcagagatcatgctcagaatcttcacgatcagcttctttttttttgttttgtttttttgagacggagtctcactttttccgcccaggccggagtgcagtggcgctatctcggctcactgcaagctccgcctcctgggttcatgccgttttcctgcctcagcctcccgagtagctgggactacaggcgcccgacaccacgcccgactaattttttgtatttttagtagagacggggtttcactgtgttagccaggatggtgttgatctcctgacctcgtgatccgcccgcctcagccttccaaagtgctgggattacaggcgtaagccactgcgcccggccacgatcagcttctaatcagcttctgcctcagcttctagtcacctcccaagagggagtccagggcttgccaccccaccaccacccccaggcaggggcacacactcaaattccagtcggacagagcatcatcatcatcgtcatcctccgcgtcctcggagccatcaggccgctcagcctcgtggggcagtgtgaccgtgcgtgacttgtggaagcgtggcttgatgtcctgctcactgtcggggacagcctcatcctcctccacatccccctgggggacaggcagactgttaagtactttggggaccacagccgcgacacccacgcccatgcccacccatgctgggtgggccctgcctgaccttgagcaggatgatgtcaatttccgagtacttcatcccattcaccaagatggggatcaacctgcacagagagggactgtttatggggatgcaggggccgtggcaaaagttggggggaggcacagcttggggaggaggcaaacaggtgccaacagagtgaccagccccccaatcagccacagagcagaccctgcagagcatgatggtactgctaggtgcaaattgatccatttccctctggggaattatcggaatctagtctctgccgctatgattaggatataaatgataccactcctgcctccagagaaaggtttttttttttttttcttaagaagcagggtctaaccctgtgggcggcaagccacccaggcaccgaggcaagagacagaggacacgagctgttccagtataataaaatataaaacaagaatagttataccagatatagatcttagatatgattatatatgaatatcattaatcattagtttgtagcaattactttttattccaatattatgataatcctcgctctataatcatagcctaggaaaaaccaggccatacagagataggagctgaggggacatagtgaggtgtgaccagaagacaagagtgcgagccttctgttatgcccggacagggccaccagagggctccttggtctagcggtgacgccagcatctgggaagacgcccgttaccaggcggatcatggtccagcggtagcaaaaggtgtcaaggaacaacacccgctacttagcagaccaggaaagtgggggagtctccctttccccgggggagtttagagaagactctgctcctccacctcttgtggagggcctgacatcagtcaggtttgcccgcagttatccggaggcctaaccgtctccctgagatgctgtgcttcagtggtcacactcctagtctgccttcatgttccatcctgtacacctggctctgccttccagatagcagtagtaaattagtgaaaatactaatagtccctgatatgcagaaataatggcatacgctgtctttctctttgtctactctccctctctgcctcggctgccaggcagggaagggccccctgtccagtggacacgtgacccatgtgaccttacctatcattggaggtgactcacattctttaccctgccccttctgccttgtatgcaataaataacagcgcagccagacatttggggtcactaccggtctccgcgcattggtggtagtggtcccccgggcccagctgccttttctattatctctttgtcttgtgtctttatttctacactctctcatcgccgcacacaggaagagacccaccgaccctgtggggctggtccctacgtaaccctatcacccaggctggagtgcactggtgcgatcacagctcaccacagcctcatgctcctgggctcatgcaatcctcctgcctcagcctcccaaagtgctaggattataggcgtgagccatggcactcagcctgcaggaaagctcttgacccaggcctggccactcagtggattatagacccctgaatacactgaaaatcttggtacagtgcctggtccctagcacaacattaaggcagggacatgcggtcctattcctggccactttcctgagatagggcagagactagccagagtaggggagcaaacagactaggcagccagcccctcagctgcagcccagagttgtaagtgacagagccttcatcacctgctcatctaggtctcatcactccccaggagccgtctgcccagccctagactgttatcaataatttggggccgggcacaggggctcacacctgtcattatagcactttgggagaccaatgcaggaggattgcctgagcccataagtttgagaccaattgggacaatatagtgagacctcacctctaatgaatgataaataaataaataaataaataaataaataaataaacatacaatatgctgggcgtggtgactcacgcctgtaatcctagcactttgggaggccaaagtgggcagaacacaaggtcaggaagctgaggcaagagaatcgcttgaacccgaggggcggaggttgcagtgagccgagattgtgccactgccctccagcctgggcagcagagtgagactccgtctcaaaaacagaaatttcaaaataataataataatgatctgggggctgggtacagtggctcgcacctgtaatctcaacactttaggagaccaagacaggaggactgcttgaggccagggatccgagaccagccagagcaacttagcaagacctcatctctactaaaacttagaaaagattagctaggtgtggtgggatgtgcctgtaatcccagctacttgggaggctgaggtaggaggattgcttcagctgggaggtcaaggctgcagtgagccatgattttgacactccactccagcgtggatgacagagcaaaaccttgtctcaaaataaaaaagaaaaaaatgatttggagagaggcaagcaatccaagtttgtcaaggagggtcagttttaggacttttgttggaaacactggtcgaaaatttctttactctgaagttcctaagctggaagggcacagaaggctacagcactacccagagggaaggttgtgcctaagaatgaagccaacacaagggaagcagatctgagaccacaaagatgcctttcacatcctttgagctcctggatacagccatacccctgaagcctttgttgatttttcatttcttttttttttttttttgagacggagttttgctctgtcacccaggctggagtgcagtggcacgaccttggctcactacaacctcagcctcctgggttcaagcaattctcctgcctcaccctcccaagcagctgggactacaggcgcctgccaccacgcccagctatttttttatatttttagtagaaatggggtttcaccgtgttagccaggctggtctcgatcttctgaccttgtgatctgcccgcctcggcctcccaaagtgctaggattacaggtgtcagccaccacatgtggccattgatttttcatttctttccacctatcagttacctaattttgaagtcttcaaaaagtggcattcttaccacttacacataaatatatactgaatgtaaactgacaaggatgtggactgagagaagcacagcaggtgaccagaagggaaggcagaggcatagcaaggggtcgaagctggggtaggacagtgggcagcagcagcactcactggaccagatgggaggccaggacttccttgcagatgggctgctcggccagcgtcagccagaactcacaggcctcaagggcaacgttctcatcatggtcctgggtcctctgcagcatgtactgtggtaggggggagaagctgaggcctggcctggctgggggtggctccctgacccctgccaccggccccctgcctgcccgcctgggctggccttgaccatgcacacctggatgatgctgtgcatgtgggggatgagcctgtcaatccgcacttccagaagcatcaccagggcacggcacacattcttccgcacctcggggtcatcatccacagccagggcaaataggtgctgcagggaggaacagggtcagttgtaggggccctcagtcctcgccctgcccacccccagcccagcggcccacctcgatgaaggtgtcaatattgtccatcagcgcctgggcccggtccatgatgaactggttcacgcaggcgatggcgtgggacctggcggggagcagacacgtgggtcaccctgaccctgcccactccaggctccctggaagcccccagggagctgcacccaccggatcttgggactgcagtgcttgaagaactgcaggaacttggggatcatgatgttgaggggcctgttgagggcgtcactgtccagaagctctgatgagtcttcacagatcttctgcagggctccaaaggctccctgagtgcagaggggcagagagacaaacgtgggtggtgggtggtggtcccagccccccagtactcgctctggccatccatggcttcttgcctacctcacaagtgttgtaatcctccgagttaagcaggttgcagagctggggcagcagctcgggccacatctgcagctcacccttggaagcgatggtggtgatgagaatgcctggggcggccgggaaaggacgctgcctgaggctgggcaggggctgcctagcacctccccctcccactggacacccccagtgctgcctttctgttccctagcccatgtacgccctctacatcccccctccttttttttttctttgtaagagatagaattagctctgttgcccaggctggactgctgtggcacaatcaatagtccacagcagcctcaaactcctggcctcaagccatcttcctgcctcagcctcctaagtagctgggactgcaggcacatgccaccacgcccaactaatttttaaaattgtttgtagagatgggatctcactatgttgcccaggctggcctaaaactcctggcctcaagcaatcctcctgccttggcctccaaaagcactgagattacaggcgtgagccaccgctcctggccttgacataggtagaagggtactccttgactcagtaggcaccctgagccttactgtgagtcaactctgttccaggccctgaggcacagcacagagcaaaacacaaaatcctcacccttgggagctggaagcaagctatgaagtaaagataaattagcaaaaaaaactgggaggggccgtgcatgggtggctcatgcctgtaatcccagcactttgggggaccgaggtgggtggatcacttgaggtcaggagttcgaaaccagcctggccaacatggtgaaaccccatctctactaaaaatacaaaaattagctgggtgtggtggggggcaccagtaatcccagctacttgggaggccgaggcaggagaatcacttgaacctgggaggcagaggttgcagtgagcagagatcgcgccacagcactccagcctgggatggagcaagactccatttcaaaaacaaacaaaacaaaaacaaacaactgggaggggccacatgccaaggactaaggggggaaatacagcagaaaagatggtgagaaagggctgtaggtgaaggtagcaactttaaattgggtggccagagcaggcctcgttgaggtgacatcttgatatctgagccaaggcctgaaggaggtgaaggaggcgagggaggaatcatccaggtttctggggaaagggcatctgaggcaggggactctatggtgcaaaggcctggcgtaaggacaggcatgatgagagagggaaaggaggtaagggcaggaaggtggcagggatgcttgtactgcctattagatatccaggagttacatacagcaggcatctgaggtgccaggacagtgcacatatctggtgacagagctggatatgggttctgttaagtgcagagatggtatttgctgccatgagatggcagtgtttcccaagggtggaaactcaacgagagaaaggtgctccctgcaatgggtaggtacacagtgaggattgtggaactttagccacaccccctcattctgtgtgcctcagtgcttccagccctcagaagagataaagaaaaccagcctcctaactaaggttatcagtaggtttctttttctctctttttttttttttttttttttgagatggagtctcactctgtagtccaggctggagtgcagtggcacaatcttggctcactgcaacctccacctcccgagttcaggtaattcccctgcctcagcctctgaagcagctgggattacaggtgcccgctgccacactcagcaaatttttgtatttttagtagagatagagtttcaccatgttggccaggctggtctcgaactcctgacctcaggtgatccacctgcctcagcctcccaaggtgctgggattagaggcgtgagccactgtgctcagcctggatcagtaagtttcaatgacttagcaaagagcctggcacatagaatgagctcaggaagtccacatcctactactggcctgggagggggtttttgcaggactaaaagttactttttatttttgagatggaatctcagtctgttgcccaggatagagtacagtggcattatcttggcttactgcaacctctgcctcccgggctcaagcaattctcctgcctcagcctctcgagtagctgggattacaggtgcccaccagctgtaattcccaagtaattttttgtattttcagtagaaacggaatttcaccatgtaggccaggctagtctccaactcctgatctcaagtgatccgcctgccttggcctcccaaagtgctaggactataggcgtgagttaccacacccagccagaagtcattttttttgtttttattttatttagttttttttgagatggagtcttgctctgttgcccaggctggagtgtagtgccgcaatctcggctcactgcaacctctgcctcctgggttcaagcaattctcctgcctcagcctcctgagtagctgggattatagatgttcaccaccacgcccagctaatttttttttttttgagatggagtctcgttgtattgccaggctggagtgcagtggcgccatctcgcctcactgtaacctccaactcctgggttcaagtgattctcctgcctcagcctcccgagtagctgggaccacaggcgagtgccaccacgcccagctaattttttctatttttagtagagatggggtttcaccacattggccaggatggtcttgatttcctgaccttgtgatccgcccacctcagcctcccaaaatgctgggattacaggtgtgagccaccatgcctggccagctaagttttttgtattttaagtagagacggggtttcaccatgttggccaggctggtattgaactcaacctctggtgatttgcctaccctgacctcccaaagttgctgggattacaggcgtgagcctattcttagtcatctttctgtaacttcctcaggccaccttccaagagtcagaaaaggctctgctgaaaacctaattccgttgcacctgaaacatgaatacctgcattattttaactgctatacccttagcactcagcccaaggccgaacacaaaattctagatgttgcatgactgtctcagagccaagaaggactgtttcaggagggagtggttccagagcgtggccctgcactgcctcagctgtttctgacttctgctgcttacccagacaggtcccttaatagctcagcgcctcagcttcctcatctatcaaatggcaatagtaatagtactaccatagagggtgccagagcattccatgaagcactacacttaacatgctgagaagtgagagttcagtgtgtcctcagaggccaacccccgctgcccctctcaccaatggtggctcggatgagcgaggaggcatcgccaatgttgttgagacactcctgtttgatgaagtctgccacagggggtgggaagctctgatagtgtgccttcacgttgttcttgaggatgaggccactgagagagcgcgttggctcatctgggaggaggaaggctgaggttcaggggcccagggggagaaagcagggtcccgatcgcatggaagggagcagagggcgtaccttctgacttgagtctggtcaggacgaaaatcaggtagttgttgaagtcaggaaactgattgagttgtttgagtttctgccaggctgttaagggacttggaagacagaggccttcccccagccaggtcccctcattatgtacctgacactatctctgaccactgggaccaggctgccagctcctgggggatcccgctccctaataagcccacaatgacacagagcacctcagacacgtcaaattcatataaggggccgggcgcggtggctcacgcctgtaatcccagcactttttgggaggtcaaggcgggtggatcacaaggtcaggagttcgagactagcctggccagcgtggtgaaaccccatctctactaaacatacaaaaaaattatccgggcatgatgtgtgcgtgcctctattcccaactacttgggaggctgacgcaggggaatcgcttgaacccagcaggtgaaggttgcagtgagccgagattgcgcctctgcattccagtctgggcgacagagcaagactccatcttgaaaaaaaaaaaaatcatacaaggagttgggtggaaatgtctgagtttcccatccactcctgaagacccagccagagcaggagagggaaggagaatcccactcctcttaaagtggcagctactagtcagcgatccccactaacaggccatgaagactttttttttttttttaaaagagggaatccaaattttggggtgagtcatgctcatggtttaaatatttatttatttattttcagacagagtctcactctgtcacttaggctggagtgcagtggcacgatctccgctcactgcaacctccgcctcccaggttcaagcgattctcctgcctcagcctcccaattagctgagattacaggcttctgccaccacacctggcttaatttttgtatttttagtagagacagggtttctccatgttggccaggctggtctcaaaactcctgacctcaggtgatccgtccgcctcggcctcccaaagtgctgggattgcaggcgtgaaccaccgcgcctggcctatatatcttttctttgagacagggtctggctctgtcgcccagggtggctggagtacagtggcacaatctcagctcaccacaacctctacctcctgggctctagccatcctcccacctcatcctcccaagtagctgggactacatgtgcatgccaccacacctagctattttttgtattttttgtagagatggggtctccctatgttgcccaggctggtctcaaactcctgggcccaagcgatctacctgcttcggcctaccaaagtgctccgattacaggcatgagccaccccgttgggccagggcctactttaatagttaatggagtagatgctagcgttcgatgaacattaggaattttcatcattttctataacaatccccgcagctctggaaatgggacccaggaattgtaatccttctctgtccagggcagatcctccgcacagcagaaaaaatctggggactaggggagtcagtccctctctttctctctctggcctttggaaactgcacgcatctacccggctcccccagccccggaaggaaggaaggatacatcctgcacgatgcgctgagtggctgtgttgggcgactgtgagtctttgagcagctgcaggacctgctgcaggccctgctcgtctggctgccagtccatggcgcaaggcaagctgcggaggtaggggccggggtcagcgctgggtctctggggctccgtgtgagacccaggtggagcccctgaggccgcggtggccgcatgacgacgggaacgccctcggcggacaggcggaggcctccgatccacgcccgcccaagtgcggggtccccgccagctgcgccatcctcggccgcgcagtcgcgggctcgggagcgcgggaggggggatgtggaaacgggccacaggcggcggcggcggggcccggcggatcctcatgggacccagcgaagagccctcgtcccagggtggcccatgccgctgaccccggctccgagcccgaaggcttccacctccctcgcagcggctgggcgagggcccagccgcctccacatccaggggccccgccccagaccgtgatagcgccccggcccccgtggtctcttctatgcaggcacagtccctgaagagtccccttcccccgacactctgcccttaacttctgccagatcccagaggcctcctgccctagtccaatttctgagcttccccagatgcgccctcccaagacgatcgtcctgatctctcctgtcccctgttcctgcccttcaagctcagtggatgccagatatccccctctgtggcctagccaaattctaaggattccccttaatcaggcccaaagcagtccccaggtaggtctctgctgcctcttcgaatgagagccagccaagcccggccaacccactataggagccccctggaccgatcccagtcgccttccccaatcaggtctggccaagcctctccctgaaattccctccgaccctgtcagcagtaacccctgctgacggatctctgttgcctctcccagtcaagttcggccgagccccccaccacctcgtgtcagtaaccccctggtccgatccttgcagcctcccccagttcggcctgggtaaacaccccccggggcattcccctcaacggatcccagcaacgcctcgaagtcagatccaagaaaaccctctaggccgaagtctgacgcccctccctgtcaggacccaacgagctcccctccccccaccccgctcaacttttcagtgcggcctcccccaatcagacccaaccaagccccaccgaaacaggcccctacacacacccgatcctcgcgacgtcccccaatcaggccccaagcagtccccagacgcttcccccaatcagatcccctccagcccgaccccagcagtcccactggccctcttcttgaggagccccgacatggcctggctccgaggccccaccccctaagctctgctcggttcccccctcccccgcccggcccgttctagctgccaggaggatcgggcccaaccggcttcccggcctttcccggtcgggcgcggccccgacgcccgggccgcgcgcggcgcaggctcggtgcccggcgggggtcgacgcaagccggggccaagagggtcgggctctgagtgaggcccacttacccggccccgggcagcagcggcggcaactcgcgctgcggcttctccagagactcgcgcggaaggagggagccaaagagagagaattaaaaaaaaaaaaaaaaaaaaaaaagaaagaaagaaaaaaaaaaaagaaaaacgcggccgtaggtgagccgccgcggctcccgtactccgttcaaactggtcccgccgagccaatcggaaggttcaaccttcacacgtgccctggcacttgggaaacccgggctgagacaaggtccggtcacgtgaccaaagagttgccgtttctttggcctctctagccagccggtcctcccagtgtctcgttttcccagcatctttcactgacctgaccgcaagctctttagctggagccaggagtttggtagcgcgtggggactttgtgtgtgatggatccaggaacccctcggccagagccagcaccctccttgtcaccttcctccactaaaaattgaaatgtgcctcccttcccccatccagaggtacttgggaggagtacgctgtgtgtgcgcaaggaaagagctgagcgtgctctttataccccagagacaaaggaaagaaagcaggacaaagtaagtgcctgagacaagccgggttcctacagaagcctctgccactttttgcattattttccagtactgtttgatagtttttacaaggagatgaaaaagccacaaggatataaatttttgaataaaacgaaatgaactaataaaataaactttgaaccacgcctaatccctttccctacctgaagttgaatgaggtggaacagcgcaggaaattctggcaagggcagggtcatgaagaaagaaatcttcttgatccttgcgacgtctgaagacagtagggcaccgtttttccttctcttgagagaggagcagatggtaaaaagctggagaccctgtagcgtcttggtttcccctccctgccctgccgataacaaagtgggagacctcctgccacttgaagcctcagtttccccacttgtcaaatgggtataagagcagttcgcgcgattagagatcatccaagttaagcatgacctggccagctctgaattgttccttaaaaacgtggctttaccctccaaggctcaaggctgttcttttactgtattcagcccctccctaagccgatatttaatgaattcaccagctctaatcccaaagaacaacccaccctgccctgaggaactttttgaccctcgagagaggcagaggtcaatttttgcccctgcctgaaggaggggaacagctatctcaacccacttgccgtaggcaaagtcagtcccggctccgttcattcatgaaaatcaagtcccgggcctccaaggttagggaagtgtcggcaggcgcctaactccactcggagaatcgcggaagacaccctaaaggagcagttgggattccgaggtagccagttccgctggactgaaacctgggctgagaaacacgtgcagaaagccgccaccaaggcatgcgtaaaggcctccctctcccccaccctccgataagccctggaactacaaatcccgtcctgccatgcgccagggtcgccgcgctttggggttttggctgagactcaaattggcaggagggtctctagaccaaccgaggtgcatggggagcagaagagtgagactggggagctggggctggatttgggggttcctggagcgagtgtgaacgataagagctttctggtcaaatttgggggctgccccagataaagatcagatggggagcgagtttgggatgcaggagacaatttgttaaggttcacccccttcatataatatggcaaattttcagcggccctccgcaagccttggggcagaacaaagtagcccctgctgcatgtgtggtccacattgttggcccttgtgtggtcacggaattttttcttcctctccagctggtgaatttgagtgttgaatcaggacaaggttttgggtttttgttgttttgttgtttttgtttttctatttctttgttttgttttgttttgtttttgagacggagtctcgctctgttacaaggctgaagtgcagtggcgcgatctcagctcattgtaacctccgcctcccgggttcaagcgattctcctgcctcagcctcccgagtagctgggattacaggcatgcgccaccacgcccggctaattttttttaatagagatggggtttcacaatgttgaccaggatggtcttgatttcttgacctcatgatctgcctgccttggcctcccaaagtgttgggattacaggcgtgagccaccgcgcctggctttttttgtttttttgttttttgagatggtgtcttgctctcattgtcccggctgaagtgcaatggctcaatctcggctcactgcaacctccgcccccggattcaagcgattctcctgcctcagccttccgagtagctggaattacaggcgcctgccaccacgccaggctaattttttgcatttttaatagagatggggttttgccatgttggccaggctggtcttgaactcctgacctcaggtgatccacctgcctcgacctcccaaagtgctgggattactgtgcccggcccagttttcctatttctttctttctttctttttttttttttttttttttttttttttttttttttgagacactgtcttgccctgtcgcccaggctggagtgcaatggtgggatctcagctcattgcaacctccgcctccgggattcaagctattctgcctcagcctcccgagtacctgggactacaggcacccgccaccacacccagctaatttttgtatttttagtagaaacagggtttcaccatattggcgaggctgatcttgaactcctgaccttgtgatctgcccgccttggcctcccaaaaagtgctgggattacaggtgtgagccaccgtgcctggccttttttccttttttttttttttttttattttgaggtggagttttgctcttgttgcccaggctggagtgcaatggtgcaatttcggctcaccacaacctctgcctcccgggttcaagtgattctcctgcctcagcctcgcgagtagctgggattacaggcatgtgctaccacgccctgctaattttgtatttttagtagagaccgggtttctccatgttggtcaggctggtctcgaattcccgacctcaggtgatccacctgccttggcctccccaagtgctggtattacaggcatgagccaccatgcctggccttttttcctatttcttaagcacctactgcatgtcaagtggtttccaaatgttatctcattaataccggatgtggtggctcatgcctgtaatctcagcactttgggaggccgagggcagatcacgaggtcaggagattgagaccatcttctggctaacacagtgaaaccctgtctctactaaaaatacaaaaaaattagccaggagtggtggcctgcgcttataatcccagctactcaggaggctgaggcaggagaatcgcttgaacacgggaggcggaggttgcagtgagccaagatcacaccacttcactccagcctgggcgacagagcgagactctgtctcaaaaaaaaaaaaaaaaaaaaaaaaggccaaatgttatctcatgcaaatctcacaacagccctatgcctggcaaacttaccctagttcaattagaagctctctgtgccaaaagaaactcacagaattggtgtccaaccagccgggcgcggtggctcacgttcatgcctgtaatcccagcattttgggaggccgaggcgggcagatcacaaggtcaggagatcaagaccatcctggctaacacggtgaaaccctgtctctactaaaaatacaaaaaaaaatagccaggcgtggtggcgaccgcctgtagtcccagctactcggaaggctgaggcaggagaatggcgtgaacccaggaggcgcagcttgcagtgagccaagatcgcgccactgcactccagcctaggcgacagagcgagactctgtctcaaaaaaaaaaaaaaaagaattggtgtccaaccgcgaatctgaaatgtgagacaaacgtgttctcaatttacagcagcctcccttcccaagcctctcatcacactgtcccccgagttcaaaggtcagcacttcaactaacttaacacagtccccaaacgcaagccaacttcttcaccctggaaagcactagctgttttaaacaatggcagggttagattctatgaatattgcccttactttagaacttgactctagagatgcttctttattttacccctatttgatagatgaagaacctgaagtacagaaaagctaagtgacttacccaagatcacacagtcaacaggcactagaatagtcagaagccagggctgtgtgactcaccaaaacctggatatgattctcctccctcttcagacttttctcaggtcagagcaggtaagtactgtaaagggatgtgcctggactttcagcctctcctgcctcttgacactagaatagaggctgagatgctgcagggcgacctacttcccaggcttctgttgctttttaaagatccagtctctgctggtggctttgggggaggaggaggtagggatggctccattagcttcctgtgttccctccccccatactccacccccaaggccaaagtcacacctgggctagcttagcatccccaaagtaggagggagagacctttcagcccacatgcaaagtaaagcagaaaaaccttattgtgtgttagcaggaagcgaaagaggaaaggtatcctattcttttttttttttttaattttttgagatggagtctcactctgttgcccaggctggagtgtagtcactgcaacctctgcctccccagttcaagcgattctcctgcctcagcctcccaagtagctgggattacaggcgtgggccaccacccccagctaatttttgtatttttagtagatagggtttcaccatgttggtcaggctggtcttgaactcctgaccttgtgatctgcccgccttggcctcccaaagtgctgagattataggcgtgagccaccacgacagctaggctgtttgttttttttttttttgagacggaatctcactttgttgcccgggctgaagtatagtggcacaatcttggctcactgcaacctttgccttctcagattcaggacattctcctgcctcagcctcccgaatagctggtattacaggtgcgcgccaccacgcccggctaattttttgtatttttagtagagacagggttgcaccacattggccaggctggtctcgaactcctggcctcaagtgatccttctgcctcagcctcccaaagtggtgagattacaggcgtgagccaccacgcccagccaacttttattttttgtagcaagaaaggtcttgctgtgttgtccaggctggtctcgaactcctgggctcaagtgatccacctgtgtctcggcctccccagtcactgggattacagatgtgagccaccattcttggcagggcagggtttttgtctgtttaggtagctgacttcacatagcagatgctcatcatttgttacatgagtcagtgctccaccccaacctgcacagactgcatctggcaaaatctgagagcctgtggtgtaccggggtaggcccacctcagcccactcccaggaccacagccctgtgccttccaccctctacttgctgaggccgtgtttctctgagtcttggtcctcttttgattgaaagtggaaggaggggccaggcacagtggctcatgccagtaatccctgaggccgcagatcacttgaggtcaggaaaccccggctctaccaaaaagataaaaattagccaggtgtggtggcacactcatgtagtcccagctactcaggaagctgaggcaggagaattgcttgaacctgggaggcagaggttgcagtgagcccagatcgcgccattgcactccagcctgggggcggagtgtgcctctgtctcaaaaaaaaaaaaaaaaaaaaaacgggaaggagggggctgggtgcagtggttcacacctgtaatcccagcactttgggaggccaaggtgggaagatggtttgagcccaggagttcccgaccagcctgaacaacacggtgagacttcgtctctacgaaaaataaaaaaaaaaaaatgagccgtgtctgatggcacatgcctgtagacctacccaggaggctgaggtgggaggatcgcttcagcccaggaggttgaggctgcagtgagctgtaatctcaccactgcactccagcctaggcaacagagggagactttatctcaaaaaaaaaaaaagaaagtggaagagggcccagccctaagctgggtaggagtgccaaggctgctcagctgctgccattcttgcctgggaagactggggtgagcctatagctgggggaccccccaacgttgctccaggtccagcaggtttgaggagttgggaggcaagggcatcttaaaacctgtgtgggtttggtggagaacaggtggagccaggcagcttctggctccaacaggatgggcagtggagccaggaggagggcatggaagggctaggtctgtgccaatgatcatgttctgtaaggttggacagagaaccccctcgccctctttctcttgagggtgtatgcatacagaagggacagactccagcctccctggaagggcttcaagtagctagaggactgagtggcccttcccccagtggagcacacagccccatggaatccagctctcagcactcctcacctcctctactaccaagatgcagtcccctccactcccctcctcagtctcccaggttctaccctcagcccccttcagtctattccccacaggagccagagggatcccctgaagatataaaacgtatgatgttgctacctcaaataccccccaaagccttctcctcacttaagaataaaatcctgggcacaacgcagtggctcaggcctgtaatcccagcactttgggaggccgaggtggatcacctgaggtcaggagttcgagaccagcctggccaacatggtgaaaccctgtctctaccaacaatacaaaaattagccaggcatggtggcaggcacctgtaatcccagctactcgggaggctgaggcaggagaatggcttgaacccaggaagtggatgttgcagtgagccgagatcgcgtcactgcacttcagcctgggtgtcagagacaagactctcaaaaaaaaaaaaaaaaaaagaataaaatcctgggccaggaatggctcatactggtaatcctagcagtttaggaggccgaggtgagagggttgcttgagcctagcagttgcagaccagcctgggcaacatagggagaccccgtctctacaaaaaaattaaagaactagcagagcatggtggtgtgaacctgtggtccctactacttgcggggctgaggtgggaggaggccaggaagtggaggctgcagtgaggcagtgagctgcgatcgtagcactgcactctagcctgggcgacagagcgagaccatctcccaaaaaaaaaaaaaaaaattcctgaattctccccaccataatccattcatccatcctcctcacttaggaggcccccatcaggcccaagctgtctccaacctggctgttccctctgcctgggactctgcctcacctccctcaggactctaatcaaatgtcacctaaaagacatacccgcctcctccctagctgcaaaagggcttcccctttttgtttgtgtctgtctccttctgtaagggcagggagggtgtggtctgcgtgctcccagctgttgtcccagagccttgcagagccctggcacataatagatgctcctaagtgtctgctgaatgcacaatgcaacagctttggccaagccaaaatggaactgtgaagagaaagtgagcctaaggtggcacggtagagatgcagcagtgaggggagataggtcttggggaaagtccaggcctacaggaggggatgtgcccctgtccttcctaacccttccatatcccgctccttactgggtcaggcccaggctttgacaggtacaatgccagcaacagggggaaggcttaggtccgacagcgcaaagaagacaaaccaagcacacagctccggcactaagtcaagttctttacttcccagaagtgatggctaaggggagggaggagggtgagaagaggaagacagaaagagccagagagaatgaggaggtgagaagggggggacagtaaaccactgttctatgaagtctcacgaggcaagtgctcaaggtaaaaaaagagtcctggagaatcgtccacggctgcgggaagcatctcggtttccttctgcttttaagtcctctcagggaaggctgtcgccgctgccgctgcattaaatagttatgtacatcgcagagagtcccaggccatgggcaggtgggggaggggcgtcatttcaccaggggccgagttttatcatcgtcaccgcactggtgagctttgtactttttcacttctgccatgtacttggcccacgcgtcacctttacttgttaatacctgtggaaaggggatacgggttaggacgggggtgccaggaaccagggtcaggactgccctgagacaggtgacccattcccagtgtcacccagaagactctgggtttgagctgaagattataaagtcaagttatctggggacccattgacagccctcctaccctgccaggcacactcataaaaggcctggataccagacagggagggagaaggctgggcgcaaaagctggaagggaaaggcaatgtgggtggaccccctgcaccaagctggctcacctcatcctccgtcttctgcttcttggctactattcccgtcttgagggctagtttgttcccgcctctgcgtttgcccacctgggtgaagggacagaagactgcaacggttacaggagccgggaccgcccttggcggcgctgaggcccactacaccttcctagcccggcctggtggcccgtcctgacgccgcgcccagctccgccagccggccgacctgcgcagcaatcagagaggagcacacgcgactcagcgcctgccctgggcccgcggtgccctcccagggagcaagaagagtgtccacctcagtagggaccagctctgttctcactttccacgccaaggcctcaccctccctagcagggaccacaagaggtggcaacagctccctttattgagcatgtactgtatgccaagccctgtgccaagtgctgtggatgtatcatctcctttcattttcacagctaccctaagatgaaagttagaaccaccccctttttgaccaggcgcggtggctcaggcctgtaatcccagcactttgggaggtagaatcgggtagatcacctgaagtcaggagtttgagaccagcctggccaacatggtgaaaccccatctctactaaaaatacaaaaacttagccgggagtggtggtaggcgcctgtaatcccagctacttgggaggctgaggcagaagaattgcttgaacctgggaggaggaggttgcagtgagccgaggttgcaccattgcactccagcctgggcaacaagaagtagactctgtctcaaaaaaaaaaaaaaaaaaagaaaagaaaaaaagaaccacccccttttcatagatgaggaaagtctttcaggagaggtcatgctaacaacaaacaatggagctgattcagggtcaggtgggtcgaagcctctggacagcatccttagacatcaagcaacattgccttccctgtgcctagcctggcatggcctctttgagggtgcagccaaaatggcccctcaatgaacaaatgaaaaagatgcaacgacgactgctactcccattcatgaagggactccactcgcaggtatcacaccaaccctggtcctgacgcttttccttccttacccttgcctcaaagagtcttcctctagcctttcatcctgtatcccaccttctcccattgattgagggcttcctgcgctccaggggctccaacagtcttcacagacaaccaggcattcagtaacctgtgctgctgggactatttccatttttttttttttttggagacagagtcttactgtcgaggctggagtgcagtggcatgatctcagctcactgcaacctccacctcccaggttcaagtgattctcctgcctcagcctcccgagtagctgggattacaggtatgcaccaccatgcctggctaatttttgtatttttagtagagtcagggtttcaccacgttggccaggctggtcttgaacccctgacctcaggtgatctgcccgcctcggcctcccaaagtgctgggattacagggatgagccacagagcctggcctgctgggattatttcacaccgattttttttttaagatactctcttgttctgtcatccaggctagagcgcagtggtgcaatcatggctcactgcagcctgaatctcctgggctcaagcgatcctcctgtctcagcctcctgggtagctggagctccaggcatgtgtggcaccatgcccagctaattttttaatttttttttgtagagatgcatttttgccatattgtccaggctggtctccaactcctgggcttaagcgatccacccacctcgacctcccaaaatgttggaattacaggtgtgagccactgcacccaacccacgcccatttttaacaaatgaagaaactgaggcttgcagaggttagatcatttgcccaaaatcacatgctggatccagaactagagcccccagtcttgttattctcaacactttttcctccacactacagggacttgatcttaacaccacagacatggcaagctcagagccaaaaatcaatatatgccctatttacttaatccagagtttctcaacctggcactaataacattttgagctggattattctttgtttgggggtgggagggcgctgccccacgcatggtaggaagttgagcagcatccctggcctctacccatagatgtcactagcaccccctcccgcagttctgacaaccaaaaatgtctccagactttgccaaatgtgggggtggagggaactgccccaattgagaaccaccagtttagcccttcctggaagacaggctctgtgctaaccacttttccaggatcacctcataaaaccctcaccacatcaagagatgctatgatgtctatttttgcaactagggaaaatgagggtaggcaaacccagaggctccaggaaagcagcgatcttgtctgtaagctcaccactgcataccagcacctagcacaatgcctagcacgaggtaaattgctcaataaatggaggttggtcgaataagatacaaggaagtcaagcaattgtcctagataagtaattgtccttacatagtacgtggtctgagtctaacacatatagctcagagtccagacttaaatttactccctttcctcacaattagtggtggtcccatgacccaaggtccgggtaccactcaaacaggaatcctgatatccacgtttcctcattctccacagtgctgattcctaggcaattcctcagctcccagttcccacgggcaagctcctggagtccccactcccgcccctagaccccagttgtcgggaatccaagttccacaccctcagcgggtgacccggacgggcccctcattcagaacggaaagtggacttcggtcccgatcccccttcacgggccccgactcccgctgccaagacaggccgtggcgcccgcccccacccccacggctccttacgaagctaagtgtggagcccggaccgcccttcctcttcggatccccggggccagcggcggcggccgactggtcgggtcgctgcggacccgggggcggctcctcctgccgctgccgctgctcctcctccatcttccgcttgaacagctccaggaagctgccgtcgttggcgaacaagttcacgccgcccgacaccgggctcgaacccgcgcccgacacctcctcgtccccgctctcgggcgacgtccccgatcccgactcagcccaacggctcccgccaccgccaccgcccgcggggcccggagcctcccggccctgaggctccgcccgtctccctcgggcagccattttgtcgccaggtgccgcgcaaaggactccgggaaggccgctccggccccgcgcttggcgcccgactcgcctcgtcccgaacaatgcatgccgggaagagcggtcaggccctccagcgcccgcagcgggggcggggcgaatgagggaaccaacccgaaggggcggggctagggggaggagcccccgtctcgcgggtttttttgtttcgttttttttttttctttttttttcagacggagtttccctcttgtttcccaggctggagtgcagtggcgcgatctcggctcaccacaacctccacctcccaggttcaagcgattctcctgcctcagcctcccgagtagctgggattacagacatgcgccaccacgcccagctaattttgtatttttagtagagacgggatttctccatgttggtcaggctggtaatctcccgacctcaggtgatccgcccgcctcggcctcccaaactgctgggattacaggcatgagccaccgcgcctggccttgttttttaaaaattagagacgggcgcctggctatattgcccaggctggtctcgaactcctggcctcaagcgatcctcctgccttggcctcccctcccaaagtgttgggattacaggcgtgagccatcgggcccagtcttgctgttttggtttttggttttttgtcttgttttggagacagagtcacactccgtctccgaggctggagtgcaaaggcatgatcagggctcacttcagcctcgacctctcagggctgaggcgatcctcccaccacagcctcccgagtagctggaaacacaggcatgcgccactacgcctggctaattttatttattcatttatttatttatttatatttgtggagacggggttttgtcatgttgcccaggctgttctcaaactcctaggctccagcagtcctcttacctcagcctcccaaagtgctgggattacaggcgtgagccaccgagccctgcctctcgggttttcaaaattcagcagtactcaggctggagttccccatacaggggctcccggagaatgagactgtcgtctgagactggggctgtagcttgctctctggagttggtttcacttggggctaggaacagattcgctttccagggctagaatccccgtctgacgacaccaagaataatctctatgagtggaaggacctcatctggggctgtgtgctcagctgacacctgggaacttgaatccctaactggggaatagagagcatgtctagtctgggccccccaagtagaaataggggtatctttgggttgggtaaccatctctgggataaagctcacatttgttggggacatagctggctctgtggagctgaagtccccgtctgagaatcagcttacttttttattttattattgttattattactttattttattttgttttattttattttttgagacggagtctctctctgtcgcccaggctggagtgcagtggcgtgatctcggctcactgcaacctccgcctcccgagttcaagcgattcttctgcctcaacctggtctcgattcctgacctcgtgatctgcctgcctcggcctcccaaagtgctgggattacaggcgtgagccaacgcgcccagcctattttatttatttatttagagacggagtttcactctttcacccaggctggagtggagtgaagtggcgcaatctcggctcgctgcaacctctgccctccgggttcaagcgattctcctgcttcagcctcctaagtagctgggattacaggcgcgtgccaccacgcccggctaatttttgtatttttagtagagacaggttttcaccatcttggccaggctggtcccgaactcttgacctcaggtgatccacccgcctcaacctcccaaagtggtaggattacaggcgtgagccaccgcgcccggcccgagaatcagcttattttatgagctgtagtattcagatgaagtcggggttatttctagtctgtagtctccctctaaagttaagagtgtcatgggctggggtctccatcaagggcctggaacccagcttctgttcctgctctaagacagaggttcaaacatgaaatatggtatactggagtcttctcttgaaatacaaggagacttttaggaattccttctacgaaacggagcgcaattgcaggaatggtgtctgctaggcatgggagatcagggcgtacaggacaagactctgtggactcgcccactctaagccactatcagcccggggacctatcgccaaccgagtcaattcgtctatgattggtttgcggcaagagccaagaggctcacagcctattgaataacagagggggcggacctgaggtgaggttgggacctaccgtgaagaatagagggaaaatgatggacataaagttgagcctatggagtcaggccaaggaggaccgggaatctaacttcaccgaaagggcatggactgggtgtttggctggttgctaaggtgaggttggcgctaccggaacataagagtgattggtgtaagtaagaaaagacatagccaatgaaaggagagctgcaagacctagggcccaatcagtgaaagggagtagcctagaccgtaccgatgtgttcattaggtagggggaacccttggaaaattatagaccagaggttgacaaagtgaaccctggaagcaaagaatagtgaaaatataatttatatttctcctaaaaggcaagtaatgaggaaattaactcatgctcctagcttcgctaggaatgtgatagagaatttcccctgtaggttcttcgtatggtgcgctccgctggatcacgtgagccagttccaaaatggcggcaggggtggccgggtggggggttgaggcagaggagttcgaagatgctcctgatgtggagccgctggagcctacacttagcaacatcatcgagcagcgcagcctgaagtggatcttcgtcgggggcaagggtggtgtgggcaagaccacctgcaggtaaggaggctgcggcgggggccaggaggcgtgtaggatataccactgggcgaaggggaggccaaggaccggcttttccaccacgaccggggcatgggggctggcgggggtctttgggtttcactctctggaagttacctggagcaaatgagaaagacctcaatgcagccctagcaccctctgagttggaccatccgtgttggggctcaagtgccgaaccacagtgaactcagcgcccgggggacggggaagcacttagatatccccatcagctggaccgtacctgagtgaatccagagttgtgggtgagggcggcaccagaacaagcaatcctagtttggtgaaccttggtgttttatgcccaaggcgagagtgagggtggaaagcgagggagagagcacgtgatgagactgtcccaggcagctacaggcaggaggtgtccgttggacagattatcctggacaagcagactgaaccatcctgtgcttactagggaatgcaggagaccccttagcttattaaggaagggggcacggagtcaagctatgctggctggaccgctgggccatgccactgtgcccagcaaaaaagaagcaggcactaggccagacagactcagtcagctgaaccttacctctctagtccacatagaggggtcaggagataaatcagagagggttcctttgtagggactgaggctcaatcccaccataacccatactctcctctcaaggcccctgctgattcgggtcacctgctccagggaacctaccactccccttgcagacccagggaacagagcccatcccctcatcccctatcttttgacttttccattactcagctgcagcctggcagtccagctctccaaggggcgtgagagtgttctgatcatctccacagacccagcacacaacatctcagatgcttttgaccagaagttctcaaaggtgcctaccaaggtcaaaggctatgacaacctctttgctatggtgagtggaacagggcttagcccccacttctgggaaaagcctcttccagcctttcttgtgcgcacacaccagcagccaccgtgtcctatccactctatatcctgtgtctctcgtgtttcactccttcctcaacatactcacaagggaaccaatgaggaattgcagagcaggaagcacaccagagtgcctgaagcttagtgagccagggtaggggaaggagaagttggagagaccaatcagagccacatggtgtgggaccttatgggccactaagaagtttggcattgactccaggttattaacgggaagctgtttgttttaagcagggcaatgtcgtggccaaattcatgtttgaaaagtaccctttgacggccaggtggagatttaattgtcagtcagggtagaagcagggaaactaacaaggagattgggggtgtaaccagttgagagatgacaacatcctggactctggtggaggcagaatgttgggggagaagtagtcagacttgaggttttttttttttttagacactcaagactcctctgtctcccaggctggagtgcagtaacccgatctaggctgactgcaacctccgcctcccaggttcaagcaatgctcctgcctcagcctcccgagtagctggcactacaggcttgcgccaccactgcctgttaattttgttttttttaggagacaggttttcaccatattggccaggctggtctcaaactcctgacctcaagtgatctgactgcctcggcctcccacagtgctgggattacaggcatgagccaccacatcgcaccagggatgtattttggaagtaaaccagtaagattacttgggtgagaaaaagaaatgaattgattacatgtctttcttgtctctctgagcagctgggatggggaaaactaggaaaggagtaggtttagaatgaacaaataaagaatttcattttgtccacagtgaatctgagttgcccactggaaatccaagtgtaaacatcatgacagtagcttgtttatgtgagtctggagcccagaggaggttggcattgatttggaagtcactgtctcaagggtggcatttaaagctgtgtgagggctgggcatggtggctcattcctgtaatcctagcactttgagaagccaaggtgggcggatcacttgaggtcaagagtttgagaccagcctggccaacatggtgaaaccccatcactactaaaaatataaaccaattagctgggcatggtggcaggtgcctgtaataccagctactcagaaggctaaggtaggagaatcgctagaacccaggaagcagagattctcctgcctcagcctccggagttgctgggattacaggtgcctaccaccatgcccggctaatttttgtatttttagtagagacgaggttttctcacgtctcaaaaaaaaaaaaaattggctgggcgcagtggctcactcctgtcatcccagcactgtgggagaccgaggcgggtggatcacaaggtcaggagatcaagaccctcctggctaacacggtgaaagcccatctctactaaaaatacaaaaaatagctgggcatggtggcaggcgcctttagtcccagctgctcaggaggctgaggcaggagagtggcgtgaaccccggaggcggagcttgcagtgagctgagatcgcgccactgcactccagcctgggcgacagagcaacactctgtctcaaaaaaataataaaggccgggcacggtggctcacatctgtaatctcagcactttgggaggctgaggcgggcagatcacaaggtcaagagactgagaccatcttggctaacacggtgaaacctcatctctactaaaaatacaaaaaaattagccaggtatggtggcgggcacctgtagtcccagctactccggaggctgaggcaggagaatggcgtgaacgcgggaagtggaccttgcagtgagccgagatcgcgccactgctttacagcctgaacaacggagcgagactcaacaaaaaataataaataaaaataaaataaaataaagagatgctgcagagtgaggatgctggcagaggacagtcctcaggtgggatgagctccatccagcatacagacccagaacttgggcgctgccagggtcagggactgggagggaaacaggaggaattggggcacttcccgggcagagatgagggtgttggcagccaatggcttctctttctcaccaaggaacaggcaagggtctcagcagtgaatgggatagaagtttgaggagggagaaaataccacataaacacttattaaggtagcagggggaaccagaattgtctggatcatcaagtgcccattggagatttgtgttcagaagaggggagcaagggcgggcgtggtggctcatgcctgtaatcccagcacttcgggaggctgaggcaggtggatcagaaggtcaggagttaaagaccagcctagccaagatggtggaactccatctctactaaaaatacaaaaattagctgggcatggtggctcacgcctgtaatcccagcactctgggaggccgaggtgggcggatcacaaagtcaggagattgagaccagcctggctaacagggtgaaaccccatctctactaaaaatacaaaaagttagccgggcgtgatggcgggtgcctttaatcccagttattcgggaggctgaggcaggagaatggcgtgaacgcgggaggtggagcttacagtgagcctagatcgcgccactgcactccagcgtgggtgacagagcaagactccatctcaaaaaaaaaaatacaaaaataagccaggcacggtggctcacgcctgtaatcccagcactttgggaggctgaggcgggcagatcacctgaggtcgggagttcgagaccagcctgaccaatatggtgaaaccccgtctctactaaaaatacaaaaattagccttgcgtggtggccggcacctgtagtcccagttacacgggaggctgaggcaggagaattgcttgaacctgggagacggaggttgcagtgagccgagatcatgccactgcactccagcctgggatacagagcgacactccatctcaaaaaaaaaaaattagttgggcctggtggtgggcgcctgtaatcccagatactcgggaggctgaggcaaagaattgcttgaacctgggaggcggaggtcacagtgagtcgagattgtgccactgtactccaacctggatgacagagcgagactccgtctccaaaagggtgaggagcaagatgggaatactcttcaggagtgttcggccctcaagtgcagtgatactaaagagctagaaagccatacctatcatttcagtgcttgcagagactgagacaagaggatcacgtgaggtcaggagttcaagaccagcctgggcaacaaagggagaccctttctctacaaaaaacaaacaaaattagctgggcatggtggtgtgtgcctatagtcccagtaagttggtaggttgaggcaggaggatcatttgagcctaagagtttgaggctgcaatgagctatgtatgagatggtatcttttttttttttttttttgagactgagtttcactctgtcacccaggctggagtgcagtggtgtgatctcagctcactgcaacctctacctcctgagtttaagcgattctcctgcctcagcctcccaagtagctgtgattacaggcgcccgccaccacatccggctaatttttgttttgggggggttttttttgtttgttttgagacggagtcttattctgtcgcccaggatggagtgcagtggcgcaatctcggttcactgcaacctcttcctcccgatttcaagtgattctcctgcctcagcctcccgagtagctgggactccaggtgcatgccaccatgcccggctaatttttagtatttttagtagagacggggtttcaccatgttaaccaggatggtctcgatctcctgacctcgtgatccacccgccttggcctcccaaagtgctgggattacaggcgtgagccaccgcgcctggcctgtatttttttttagtagagacggggtttcaacatgttggccaggctgttttcaatctcctgacctcaaatgatctgcctggcttggcttcctaatacactgggattacaagtgtgagctaccgcgcccggccaagacgctatctctaaaagaaagaaaaaaaaagctggaagtaaccagagtgggggattttgccaacagcaaggggaaagggagtgtttgcagagggaacctgtggaggctgggctggataagggtgccagccaagaggaacactgacagtttacaggggccaggtgaggggatgaagtagtccaaagaagcttaaaatatatgaagcataagaagagggtgcagtgatgagtgggcaagctccccaacagggaatgacccctaaggccagcgagttgggtacttccccatgggacccatgaagttaccaagaagaggtgacagaggaggaagataaagagggaggcattggccgggcatggtggctcatacctgtaatcccagcattttgggaggctgaggtgggtggatcacctgaggttgggagttgaaaaccagcctgaccaacatagagaagccccgtctctactaaaaatacaaaattagctggggtggtggcgcatgcctgtaatcccagctactcaggaagctgaggcaggagaatcacttgaaccctggaggcggaggttgcagtgagccaagatcacgccattgtccagcctagacaacaagagtgaaactccatctcagaaaaaaaaaaaattacaaaaattagccaggcatggccaggcgtgatggctcgtgcctgtaatcccagcactttgggaggccgaggtgggtggatcacgaggtcaggagatcgccaccatcctggctaacacagtgaaaccccgtctctactaaaaatacaaaaaattagccaggtgtggtggcgggcgcctgtagtcccagctactcactgcactccagcctgggtgacagagcgagactccatctcttttttttttttttttttttttttgagatggagtctcgctctgtcgcccaggctggagtgcagtggcgtgatctcagctcactgcaggctccgccccctggggttcatgccattctcctgcctcagcctcccaagtagctgggactacaggcacccgccacctcgcccggctaattttttgtatttttagtagagacggggtttcaccgtgttagccaggatggtctcgatctcctaacctcaggtgatctgcctgcctcggcctcccaaagtgctgggattacaggcgtgagccaccacgcccggccaagactccatctcaaaaaaaaaaaaaaaaaaaaaaattagccaggcatggtggggcatgcctatagtctcagctactcgggaggctgaggcaggagaattgcttgaacccagaaggtggaggttgtgatgagctgagatcgcgccactgcactccagcctaggcaacaagatcaaaactccatctcgggaaaaaaaaaaaaaaaagagggaggcattgagtctgagactggccagggaccccagccatggccatcccttcatagattctacatacatgtttgtgttttgttttgttgtttgttttttgagacagagtctccctctgtcacccaggctggagtgtaatggcgtgatctcggctcactgtaacctctgcctcccgggttcaagcgattcccctgcctcaacctccagagtagctgggattataggcacccgccactatgcatggctaatttttgtatttttagtagagacggggtttcaccatgttggccaggctggcctcaagctcccgacctcaggtgatctgcccgcctccgcttcccaaagggctggaattacaggcatgaggtaccgcgcctggctggattccccatatgtgctgacgacctctgtgccaggcactgttcatgctaagcgctaaggacacagcagtgaactagatggtaaaacccctgcccctgaggggcagacattcctgctatggagacagatgataaacatgataagggaatcatgagggatgtgaggaagggctaatttttttttcagataggtcttgctatattgcccaggctggtgtccaactcctgggctcaagcgatcctcccatctcattctcctgagtacctgggactacaggcgtgagctatcctgcccagctcctaagggctaaaccttaaggagaaaggaaggcagggcaggggtgtcggtggatctgtgctgttacttagggtggtcagggagtctctcagtggagggatgatgatccggaagaggtcatggcccagtcatgggagtatctggggttgcaagtggcaggttgcaagtggggagtagcagtgtaaatggcccgcagtgggtttcagcttccctttgagggccctgggcacagcttgcaattttccccttgtttttgaccctttatgcaaccatacaaaaccctaagtactacctcagggtccccccagccgtgacctaatgaaatgcctgtggtcacagcccaccacaggctccctctggccctgtgcccgggtaggaaggctccccctggccctgtgcccaggtgggaaggctcccccagcagtagcagcaacctcagtctcatccctttggcccccaggagattgaccccagcctgggcgtggcggagctgcctgacgagttcttcgaggaggacaacatgctgagcatgggcaagaagatgatgcaggaggccatgagcgcatttcccggcatcgatgaggccatgagctatgccgaggtcatgaggtcaggcccagccagcaggggtgggggctgcctggggaaggggaagagcggacacagagggcctgacccctgtctcccctcaggctggtgaagggcatgaacttctcggtggtggtatttgacacggcacccacgggccacaccctgaggctgctcaacttccccaccatcgtggagcggggcctgggccggcttatgcagatcaagaaccagatcagccctttcatctcacaggcaggcggcgggggcccccacctgcaccatccaggcagccgggagtgggagtaggcccgggcccccagaccctcaaatgcgcactaacaattccctttccttcccaccccttctcactctggacttctccctggaggggatgggacggagctgtctttcctcccccacaggcaggactcagtgtccctgcccctgcccgctaaataccctagacagagccagaaagcacattccagaaccaggcaacctgccttcaaaccctctacactcaccatgtgacccaactgctgtgtgacctcaagcaaatcacttcacctctctgggcctcaccttccttgtcttgcaaatggagatcatgagagtgccccatgggttattattattattattcgagacggagtctcgctctgtcacccaggctggagtgcagtggtgcgatcttggctcattgcaacctccacctcgtgggttcaagtgattctcgtgcctctacctcccaagtagctgggactacagacatgtaccaccatgcccagctaatttttgtactttttgtagagatagggttttgccatgttgcccaggctggtcttgaactcctggcctcaagcagtacacccacttcgacctcccagagtgctgggattacaggcatgagccactgtgcccagcccccatgggttattattacgatgacaaccctaaagcccccacagtgctgcacaccaccagcaccacccaccatggtgtatgtgcacgtgtgggtgtgtgcgtgtcccctgtggggacctgtgcctcaggtggtaacactgagcacttactgtgtgccagacactattctcagcacattatatgcttcagctcatctggtacaacagatctgggaggtaaagtttagagatggggaaactgaggctccaggagggtcaagccccttagctatggttccctaaaaatggcaaagctgaggccggccgcagtggctcatgcctgtaatcctaggacttcgcaaggccgaggcaggtggattgcctgaggtcaggagttcaagaccagcctggccaaaatggtgaaaccccaccagtactaaaaatacaaaaattagccgggcatggtggtgcgcgcctgtaatcccagctactcaagaggctgaggcaggagaatcgcttgaacccaggaggcggcggttgcagtgagccaaaatcacgccattgtactccagcctgggcaacagagtgagactccatttcaaaaaaaaaaaaaaaagaaagaaagaaatggaaaagctagtatttgaccaaccccaggaatctgcttatgggcctgagcctttaaccactgggaggtatcaggagtcatccctcgggtgtttagtgaacccccaacccaggaggtcgccgcaggtaagctatgagccctcccacatcccccctgcagatgtgcaacatgctgggcctgggggacatgaacgcagaccagctggcctccaagctggaggagacgctgcccgtcatccgctcagtcagcgaacagttcaaggaccctgtgagtggtggtctggctggcggtgagaggcccgggggctgaggacaggggcagaccccgcccctcactgtcctctctcgtgccctgtaggagcagacaactttcatctgcgtatgcattgctgagttcctgtccctgtatgagacagagaggctgatccaggagctggccaagtgcaagattgacacacacaatataattgtcaaccagctcgtcttccccgaccccgagaagccctgcaagatgtgtgaggcccgtcacaagatccaggccaagtatctggaccaggtgtgcccacccacccagcactggctcagcagaggcacctctgcccctttattctctgatcttttgctccaccatctggccctctgccctctagcctcctgccctttgcccccacatttcagatccttcacccttattccggccatagaggactgtggctggcctggcctaggtccctgtgaccctggagagcagggggtctagcccagtgatctctgaccatagtgatgcagctcccacttatgacaccttaagctcctgccctatattctctccctgactctggaagctttctagctttaccgcttctattgatccacactctgtctctgccttcctgccccctgaccactgccttctaccctctgccctggctgcagatggaggacctgtatgaagacttccacatcgtgaagctgccgctgttaccccatgaggtgcggggggcagacaaggtcaacaccttctcggccctcctcctggagccctacaagccccccagtgcccagtagcacagctgccagccccaaccgctgccatttcacactcaccctccaccctccccaccccctcggggcagagtttgcacaaagtcccccccataatacagggggagccacttgggcaggaggcagggaggggtccattccccctggtggggctggtggggagctgtagttgccccctacctctcccacctcttgctcttcaataaaatgatcttaaactgctgtattgttgacattgggaggtgagggtaagcacctttatgtacagttgcacaggttgtgcactggacagaagtgtcacatctagaggggcccattcacaacagagacctaatagagatgcatgtttattgtggcaactttggaaggagggtgtcttgggtgagagatacctttgtctcattctgtgtgggttaaggtgtccctgttgggcctgtgaagcctggaatggaagacagaggcattttcccacttccttggaggctcagagcgtgggaactgggaggccccttggccagccccaggctggtggggagcagagcagattaggccggcagtgggcccggcactgcctgctgtttggtttgggaattagtgggcgccctggggagaggccaggcctgccagactggggattaacagtctccaccccccaattcctgcccccatgggatggcatcagcccctcccagcaaagggctgcagcaagggggctggttagtgggcagggtgacagaggactccggctggaggggctcctgaagtctcatcctgactccagagcggtctcaggctgtgggcacacaggcctggaaggcacctagtggacccccttatcccctgcccttcgctcctccctctgccactgcctgggctgctattgttgtccccacttgggagactcaggatggggtatgaccttgagagtttacaagttccaagccagagctggctaggggggacagaaagggggttcctgaggacacacgtgagtcggtgttcaggccgggcgcggtggctcacacctgtaatcccagcactttgggaggccgaggtgggtggatcacttgaggccaggagttcaagaccagcctggccaacatggcgaaacctcgtctctacttaaaatacaaaaattagtcgggcatggtgttggggtgcttgtagtcccagctgctccagaggcttaggtgggagaatcgcttgaaccccggaggcagaggttgcagtgagccaagacagggtaagaccctgtctcaaaaaacaaaagtggtgttcaggtccagtcatggtggctcacgcgtgtaatcccagcactttgggaggccgaggcaggtggatcacgaggtcaggagttggaggccagcctccaactactctctactaaaaagacaaaaattagtcaggcgtggtggtgcccacctataatcccagctacttgcgaggctgaggcaggagaatcacttgaacctgggaggcagaggttgcactgagccgagattgcgccattgcactccagcctgggcaataaagtgagactccgtctcaaaaaaaaagtgttcagacccagagtctgggtgtgccagggtgtgtgtgtaaggggaaccccaccaggagcctagacttgtcactccaactccctggggtgtgcacaagcaggtgtgggcctgttggggtggcatgtgtaaacaaacacgatggtacagccggctccgcgccaaactgccaggatccaaatcccagctgtgctacgaacaagatgagatgtgacatcggagcctcagtttccctacttagatagtaagatgaccaacttagcatgcccgtaaggattccatgagatgaaacacgcaaggcgtttataccagcaccagacaggaaaccgcaagaaatgtttgttatttttcgttgtcacaattagtaagcatatcaaatagcccaggaagcctgcccccagcccctgcgggaattcagcagtcggaagtgtgtggggatgcgggtgagctggggtagggaggatgaaaaggaggagcgggcttcagtgaatgcaaggacacttcctagggagtgagggctgctgatcgagaactgagctcatcagcaccgagcctgccaccgccttgccaggttccgcagctgacggcaccgccccagctgccccctcgcccccatttatgggctgtccggcagctggacagcgaaggcatgggtcacagggtgaccagcccaggcgggttcctaattactccgggcagggtgaacatctgccagtctgggaacacggcgtcccagcctgctgggcttggaacctcgggcggggctatgtagaatgcacgaggggctcctgagcactctaggatgcccatcccagggtttgacccctgaacttctgcccctcccacaccaatctgtgtgttaatgttcttcaggctgggcaatggagggggagtgggtactgtttgtaccaggctgggagtgtcccctttagaggtgtgtctgtgaagaatgaacatctgcccagaatccatgccaaatgcaggacaaggttttgtgtccccaagcttgtgtgttcatggcaatgctgagagtatctgagacctgtgggtgtgggtgtgggcctgccgccgggagggagcgttggaaagggggttgccttcacatattggtgtacaaatgctggtgaatttcaccagcggtgatagctaggggacccttgagggaggggtggctgttgtgtgtgtctttgcaagattggtgaacctcaggccccgctctgagcctgggattgtgtgccaccgcactgaggaaagggtttttgcatttggtgtgtgatcatggctgcatctttgcacagggaagatcgggagtaaaacctccttgcagtggagtatgactgtgtgtgtgaaggcattctgaggtctgggtggggtctggcacttggctggttgtgtgggtgtctttgttacatggcgtgatcatgacggaattcagaccgttgggagagccgtgtgtatgaaagaggagagcctagtatgtcagggtccacctgccttatatatgcgtgatggaggcaggaggggtcgaggtaggtgtgtcttgtgtgaccctggaaggttctgtgacagtgtgtactgctcctctgggtaaccatagttatgtgaggctgtctttttgttttttcaatagagatggggatctccctatgttgcccaggctggtctcgaactcctggctcaagtgatcctcccacctaagcctcccaaagtgctaaaattacaagtgtgagccatcgtgcctggctgaggctgtcttaagagcagctagatttgcttctgggactatgatgtgtgtttctgcgtgcatctctgtgacactgtgtgattacaggtgactgtgaagtgacccagcctcactgagcagtgtgtgtgtttctgggactgggaaaaagaccatccctgcctcctcccccaacctctgggttccagatccctaggacctgccagtgagcgactgggaggggaacagggaggggcgagggaggacaaggcggatttctccccccgtaccaggtaacaaacttgtgggactccaaacaaaattctgaagctacagcctagccgagggaggaggaccaggaaagggaggcacgcccactccccagccccacccaacgccaaagccacccgcccattccatccctgtccctgtgggtccttgcaccggccaccttcaacacaggtgagatgagcccaggcttggggaaatagggggccctgagggaagagggaacctgcgggcaggaatgcatccggagtcctcccggggcggggagtggagggcttggaaggctggaggggaacggagagaggaaaggtcaaggcggatccgggaggaaaagggagtggggggagccagggcaattaagcagaaggtgcacaggctggggcaggggggctaggggacctggaggcttagggacagggcttcagagggagtgcagggagcagaatgggtcaagactgggagctggggaagtggagaagggggagccagaaataggggctgagggagagaatttgggagaggtggagccttgagaacctagaaactcaggtgctggggacttgcggaatggggcatgctacaggtggcctctgggtgaaggggatcgggcagagggtgactcgggagctgactgcagggactcaagggtcttggtggtgggggacggcagttaccagagcccacggccaggagtccagggaaggggacagcctgagatgaaggtcagggaggggcactgggggctggactagactgagtaaagctgggaggagaaggcaactcaggcaagggtcaggactgaaggggtggcgggccggaacatgggtggaatccctgtgctcagttatccccgcacctctccacccacacccgcagcccccacccgggccacccactctcccttggccacacctgccgggtgccacgatgaccgtcacctacacagcccgagtggcgaacgcccgcttcggtggcttctcccagctgctgctactgtggcgtgggagcatctacaaactcctgtggcgagagctgctctgcttccttgggttctacatggcgctgagtgctgcctaccggtgaggctgccctgaggtgctcatgttctagcggagggggggcagctattatatatatataatatataaaaattataaaaatatagagatatataagtatatatatctatgttttttaaactgagatggagtctcactctgtcacccaggctggagtgcagtggcataatcttctcttacttccacctctgcctcccgggttcaagcgattctcctgcctcagcctcccgagtagctgggattatgggtgccagccaccatgcctggctaatttttttgtatttttagtagagatggggtttcaccgtgttgaccaggctggtctcaaacttctgacctcaagtgatcctcctgcctcggcctcccaaagtgctgggattacaggtgtgacccatagcacccggctgggggcagctattataaaagaagccagggtgaggggcacagcaagagagatctgaagctggggatggagtcacccttgtgacctgtgacccctcatctctatcccgcagctttgtgctgaccgaagggcagaagcgctacttcgagaagcttgtgatttattgtgaccagtatgccagcctcatccctgtctccttcgtgcttggtgcggtccaaccccaagtcccccgttcccatgtccctgagaaacccatatccattcatgccttttgaggagcccccattcctgcccctctgagatcccccccctcaaatccaaccccgacagcactgcccacccatttttggatccatatcatgaagatgccagatgtggctctacactctgagacctggggtgtcacctggggtcacagtgccccctgaggtgcccccaggagagctccatctcacacacaggacttattcctggtcaccctggggattctcaccagtgtctgttgtgttattaggggggacaaacccctaaccctccagggaccccataggactccatcctctcaattccagcctgggggcatttctctgacaagtcttggacccctagtgaccacaagtgaccctagcctgcccaaggctccctgatgtagaccctgtccccaaccccttcagaagttcctggctcaggggccgggtgtggctactgtgacaagcctgaccagatgtctctgatgtacacccccacaaaccaggcccctctccccttgttttaggtccctatgccttcacagcaagcaacagtctgcccacgtgcccctaacatgggctctgtgcctctatccccatactgggatcccaatgtcacatctgaggtgactcccaagtagccagtgacccaaagggctgctctgcctttttttttttttttttttttttttttttttgagatggagtctcgctctgttgcccaagctggagtgcaatggtgcgatctcagctcactgcaacctccgcctcccgggttcaagtgattcttctgcctcagcctcctgaatagctgagactacaggtgcgccaccatgcccggctaatttttgtatttttagtagagacggagtttcaccatgctggtcaggctggtctcaaactcctgacctcatgatccaccctcctcagcctcccaaggagctgggattacaggcgtgagccaccgcgcccggcaactgtcctttctgacctcagggctggacccccaagttcccagcccaaacgtggtcaggttggccagcacgctcgggtttccctgatgcagaccttacgttgccccctctcccacaacctgggcccccaaacccctggccctggtgtccccactgagcccccattccccgctcccctgcaggcttttatgtgacgctggtggtgaaccgctggtggagccagtacctatgcatgccgctgcccgacgcgctcatgtgcgtggtggcgggcaccgtgcacggacgcgacgaccgcggccgcctctaccggcgcacactcatgcgctacgcagggctctcggccgtgctcatcctgcgctccgtcagcaccgcggtgttcaagcgcttccccaccatagaccacgtggtggaggctggtgagtactcggccagaggcagggcagagaccgggcaaggaccaggtggaggggggcaaggggcgagctatccctgacccctttcctccagggtttatgacccgcgaggagcgcaagaagtttgaaaacctgaactcatcctacaacaagtactgggtgccctgcgtctggttctccaacctggcggcacaggcccgacgcgagggccgcatccgcgacaacagcgcccttaagctgctgctcgaggtgggcccaaccaggaggtcattcatatagaataccagggaaattgtacccctggagctgtgtcaacggcggccctccaagcacccccacgaggccgatttcaaacaccctcaccaggtgcactcttacctccatggggctgattccaatgcccttgaggggcagctcctgggtgcatggtacctcatccaggtgcacactcaccaccaaataccctccctggaacccccaaagcacactcccaattcccaccaggtgaccacccacctccatcccacgtacctacacttaatatccctgtgtgagctcaccattcaggcctcctcatgacctgtatccacccccaggagctgaatgtttttcggggcaaatgtggaatgctctttcactatgactggattagcgtacccctcgtgtacacgcaggtaaccccatcatgcctctttttatattcggtgtcagtggccctgatgcctggtttccaaggggaaaccaagaactagctaagacccccatcataatgatgcctaatcctagccttggaccccaatgacccccctgagccctgccccgccctgcccaggtggtgaccatcgcactgtacagctacttcctggcttgcctcattggtcgccagttcctggacccggctcagggttacaaagaccacgacctagacctgtgtgtgcccatcttcaccctcttgcagttcttcttctacgccggctggctcaaggtaggtgggtgatccaggctggaatttcgtgggtggggcgggcatggggttcccaagtttccacctaactgctccctctcctctcaggtagctgagcagctcatcaaccccttcggagaggacgatgatgactttgagaccaactttctgatcgatagaaacttccaggtgagactcagtttccaggtgagacttccaggtggcgaccatcccggagtgcccaacagggttctggtcccacccctgccaagtcttgccaggtctcaccccaaccatccttccctctgtggtccccacccacccgaaggggtccaccctgtggtcccggcgggttgccctgcccccactttaccctgtgtgtttgcacccgtaggtgtccatgctggcagtggacgagatgtatgatgacctggctgtgctggagaaggacttgtactgggatgcagccgaggctcgcgccccatacacagcggctactgtcttccagctgcggcagccttccttccagggctccacctttgacatcacgtgagccagttgggtgggcagggccgcctggggcagggcttatggctctgcggggcacatctgattgaaaaggttaagtggaatcaattctggagatggggataagagctaaagtctcaggactgtgataacgccagaagctaagataggagtcaggggacaaggtcaaggtctgagactgggccactgactggggacagagctaagggctgaggtcagcgaggatcagaccggtcagtggtgattccaaaggagatgagggctgaggccaggagcactggctcacgcctgtaatcccagtactttgggaggctgaggcaggaggatcctttgagcaagcccaggagttcagaccagcctgggcaacatagtgagacccccgtctctactaaaaataaaaaattagccaagcgtggtggtgcacgcctgtagtcccagctattcaggggctgaggtgggaggattgcttgagtcgaggagttcgaggctgcagtgagccataatgacaccactgcactccagcctgggcaacagagcaagagcctgtctcaaaaaatgaaaataaaggccaggcgcagtggcttatgcctgtaatcccagcactttgggaggccaaggcaggtggatcacttgaggtcaggagttcgagaccagcctggccaacatagtgaaaccctgtctctactaaaaatacaaaattagccgggcttggtggctcacgcctgtaatcccagctaatcgggaggctgaggcaggagaatcacttgaacctgggaggcagaggttgcagtgagccgagattgcgccattgcactccagcctgggccacaagagtaaaactgcatttcaaaacataaaaataggccgggtgcggtggctcacgccaaggtgggcagatcacgaggtcaggggttagagactagcctggccaacatggtgaaaccccatctctactaaaaatacaaaaattagccggtgtggtggcacgcacctgtagtcgcaggtactcaggaggctgagacaggagaatcgcttgaacccgggaggcgaaggttgtggtgagccgagattgcgccactgtactccagcctgggcaacagagcgagactccgtctcaaaataaaataaaataaaataaaaataaaaaaggaaatggggctgagccacgactgaggttgaagatccaagttgaagtgcaaacacagggtgaggccaggctctgggtttaggagctaagatctttggggataagtgggacaaagcggtgggtggagtcagggaaatcagcgcgcctgggaccctgctctgtcaacaagaggcgaggccgcagcgctggcccactgtcggtcccgcaggctggccaaagaagacatgcagttccagcggctggacggcttggatggaccgatgggagaggcgcccggcgacttcctgcagcgcctcctgccggcgggcgcgggcatggtcgcgggaggcccgctgggccggcgcctgtcctttctactccgcaagaacagctgcgtgtcggaggcgtctactggggccagctgctcatgcgcggttgtccccgaaggcgcggccccggagtgcagctgcggggacccgctgctcgaccccggcctgccggagcccgaggccccgccccctgcgggtcccgaaccgcttaccctcatccctgggcctgtcgagcccttcagcatcgtgaccatgcccgggccccggggtccggcgccaccctggctgcccagccctattggcgaggaggaggagaatctggcctgagatcttagagcccagccccctaaggacagggaaccaggtccctgcacggcacccacgcaggtgtcccggtctgcataagcctcgtgtgcctttgtaaagtccacctacacttttgaccagctctcgctgcccgcatgtgtttggcgctgtgctaggggcgggagttcttccagactcttggaccagcccgccctgaccaccagctctacttcccaacccccactgcctgagaggtctctatcagtgtcctgcctgaattctttccttcaagtgaagatgtgactgactacctcctcgagttgtcatgaggatgaaagaatggcattaaagcatttggtatacagtaggtgctcaataaattgctagtgatttttactcaaacgttgttagtctgatttctcctgccagacattatccattgtcctaagtaaaatttgggagttcttgcaggttcttttttttttttttttttttgagacggagtctctctctgttgcccagcctggagtgcaatggtgtgatttctgctcactgcaacctctgcctcccaggcccaagcaattctcctgccttagcctcccaagtatctgggattacaggcacgcaccaccacacccagctaactttttttaatttttagtagagaggggggtttcaccatgttggccaggctggtttcgaactcttgacttcaggtgatccacccacctctgccccccagagtgctgggattacaggcgtgagccaccaagccctgctgcaggtttcttctttcttcttcttccttctcctccttctcgtcttcctcctcctccaccacaaccaccaggcccagcttattctaggtttttttttttcctttgagacagagtctcacttcatcacccaggctggagtgcagtgccacgatcttgggtcactgcaacctccacctccctggttcaagggattcttgtgcctcagtcccccaagtaactggaattacaggtgcgcaccaccacacctggctaattttttgtatttttagtagagacggggtttcacctcttccaggttttatgatggtgccctgcttaattcttcccaaactctgctgtctgaaacacccacatcagtgccctggcattactcattaatgagccagccactgtcccaggatcatgggttcttcttgcctcaagcctctgcattctcaggccctcagggcttcaggttttactaatttaatatcacacggactcctgatgactcctgaatataaaagtccagccaaggcagtgagctctggtcatgccactgcactccagcctgggcaacacagtgagaccctgtctcaaaaaaaaaaaaaaaaagaggcctggtgctgcagtggggctcacacctgtaatcccagctgggaggtggagatgggtggatcatttgaggtcaggagctggagacaggcctggccaacatggtgaaagcccgtctctactaaaaatacaaaaattagccaggcgaggtggtgggcacctataatctcagctactcagaggttgaagcaggagaatcgcttgaacctgagagatggaggttgcagtgagattgtgccactgcactcaagcctgggtggcaacagagtgagaccccatctgaaaaagaaaaaggaagaaaaagaaatccagccaggatcccttctctaactgtagacccagaaagccaactgcctcttggatgcctccttgcagagatgtcacagacacttcaaacataacacacttgaaatccagctcctaatcagccccccaatctgccccaccctgtgtgttagctttgtccttccaggtgataaggccaaaagaagtcatgtggattcctattcccgccacaggccatcacatcaacccagtggccacaccaacccagcagcaaatcttatcagctttgcctttatttttattttatttatttatttgtttttgagacggagtttcgctcttgttgcccaggctggagcgcaatggcgcgatctcggctcactgcaacctccacctcccaggttcaagcaattctcctgcctcagcctcccgagtagctgagattacaggcatgcaccactacgcccggctaattttgtatttttagtagagacggggtttctccatgttggggctggtctcgaactcctgacctcaggtgatccgcccgcctcagcctcccaaagtgctgggattacaggcgtgagccaccgcgcccggccgagatttgcctttatttttattttatttttgagacggaatttaactcttgtcaccaggctggattgcaatggcatgatcttggctcactgcaaccttcgcctcccgggttcaagtgattctcctgcctcagcctcccaggtagcttggattacaggcgcccactacacccagctaatttttgtatttttagtagagacagggtttcaccatgttggccagccaaagtgctgggatcacaggcgtgagccaccgtgccctgccagctttgcctttaaatcgtatctagaatccaaccatttctcactcctccaggaccccagcctggccagagccctcactatcacccacccacccacctggactaccaaccaggtcttcaagctctggccctggcctcctaagcctgtttctcccagagtggccaccagagggcgcctatgaacacccgagccaggtcacatccctcctttgcttagactcttccgtggctcccacagcacttagaataaaagttaaagtattctctgcagcccacaagtccctgaataatctccccaccctcatctgctttctttttctttttctttttttttgagacagagtctcgctgtatcgcccaggctggagtgccagtggagccatctcggctcactgcaagcaagctccgcctcccgggttcacgccattctcctgcctcagcctcccgagtagctgggaccacaggcacccgccaccacgcctggctaatttttttgtatttttatttttatttattattattatttttttgagacggagttttgctcttgttgcccaggctggagtgcaatggcatgatctcagctcaccacaacctccgcctcccagattcatgcgattcttgtgcctcagcctccagagtgactgggattacaggcgtatgccaccacatccggctaattttgtattttttttttagtagagacggcgtttctccatgttggtcaggctggtctcaaacttctgacctcacgtgatccgcccgtctcagcctcccaaagtgctgtgattacaggcgtgagccactgtgcccggccgcatttttttgtatttttagtagtgacgggtttcaccgtgttagccaggatggtctcgatctcctgacctcgtgatctgcctgcctctgcctcccaaactgctgtgattacaggcgtgagccactgcacccggccttctgctttccttttattttttgagatggagtcttgctctatcgcccaggctggagtgcagtgacacaatctcggctcgctgcaacctccgcctcccgggttcattctcctgcctcagcctcccgagtagctgggactacaggcacctgccaccacgcccggctaatttttttgtatttttagtagagacagggtttcaccatgttagccaggatggtctcaatctcctgaccttgtgatccgccagcctcagcctcctaaagtgctgggattacaggcatgagcgtgagccaccacgcccggccttctgctttcttattcactccactccagccactctggtccccttactgtccctccagcacaccaagcgaggtgtcatctcagggcctttgtgcaaactgttctgcctggatcttccccaggtacttacatggcctctccctcacctccttcaggtatctgcttcaataatgtcacttccttggtgaggcctcctttctgggcctttttattctttttttttttcgatggggtctcactcttgttgcccaggctgcagcaagctatgattgttccacagtggtggctcactctggtaactctgggcaccaaggtgagggagataaagtgggccagggtttagcccactgcttttaagaaaagcttagtggccaggcgtggtggctcactcctgtaaccccagcactttaggaggctgaggtgggcggatcatctgaggtcaggagttcaagaacaccctggccaacatggtgaaaccccgtctctactaacaatgcaaaaattagccagtcgtggtggcatgcgcaggtggtcccagctactcaggaggctgaagcaggaaaatcccttgaacccaggaggcagaggctgcagtgagccaagatcgtgccactgcactccagcctgggcgacagagtgagactccatctcaaaaaaaaaaaaaaaaaaaagcaacaacaaccaaaaaacaaaaccaccacacattcacagacacacaaacgtgatcctcacctacctctggttggtgctattggtcactcacattttagtaagaatgcaagccaagcttttctttctttttctttttgagatggagtcttgctctgttgtccaggctggagtgcaatggcatgatctcagctcactacaacctctgtttcccaggttcaagcgattctcccacctcagcctcccgagtagctgggattacaggcatgtaccaccatgccctgctaatttttgtatttttagtagaggaggggttttgccatgttggccaggctggtctcaaactcctgacctcaggtgatccacccgcctcagcctcccaaagtgctggggttacaggcgtgagccaccgtacctggccgctaagcttttcttaaaagcaatgggctaagcctctggcccactttctctccctcaccttggtgcccagagcacagccagggcagattgaacgcctttatttttctcaaatataaaatcagagtctcctgaggcagcacatgaactccagagagagaatcaacaacaagaatcacattgctaaaaagaacaggcctatatctacctcccgccctccctccccaccaatctgggagagggaagagcagagatcatggcctcaaagctctcgagcacctggctgaagcccagtgctgggcgccatgtgagctggaggaagccagggtgggtggagcccaggctggcttgattgtgaggtctgtcagtgcttgtcagtggggcgaaggttcagagatgccaggcgtcccaagggtccacggcgagaattggttgccagccgctgctgtgccaggaatgactgggcatgggcaggcgcccgctcctccccagctcgctgctgcaaggccatgcccttcaggaggaggtgtggttggggtcaggtgagctcacaggacccccccaccaatattctacccatgagatcttagagcccagaccccacacttaccatattataccaggcactgatgagcagcttttcttcctgctcccgctgacttcggcttttctcaaagtccatctgtcaaggaggcaagtgtcaggggcctagatacgttggaggcagcgtaaagggacgaggacacccacctccaggtgtcggatgcggacatcccgttctcggagctgtgtcctcagggaatggagttctggaggtgcccccgcagctggccgctgcttgggttccatggtctgcatgacctacaggttgaggaagtcatagccaggtgactttggccttgaaaccccctgggacatactggggtgtgtgtattcattcattctttcattcattatagagacagagtccccctatgttgcccaggatggtcttgaactcctggcatcaagcaattctcctgccttagcctcccaaagtgttgaggttacaagcatgagccattgtgcccatccagccagtactttatttttactttatttttatttttatttttgtgatggagtctggctctgttgcccagcctggagtgaagtggcgcactctcagctcactgcaacttttgcctcccgggttcaagtgattctcctgcctcagcctcccgagtagctgggattacaggcgcatgttaccaatcccgcctaatttttctatttttcgtagagacggggtttcgccatgttggccaggctgctctcgaactcctgacctcaagggatcagctgcttcagcctcccaaagtgctgggattagcggcgtgagccactgcgcctggctgtgcgtaattttttttttttttttttttttttttgagatggactcttgccctgtcgcctaggctggagcgcagtggcacaatctcagctaactgcaacctccgcctcccgggttcaaatgattttcctgcctcagcctcctgagtagctgggattacaggcacccaccaccatgcccagctaatttttgtatttttagtagagatggggtttcaccatgttggccaggctggtctcaaactcctgacctcatgttccgcctgccttgacctcccaaagtgctgggattacagccatgagccacggcacccagccagctgtgcagtattttaatgtgacaatcagtagcagtggggaatcatgcagaagtctgtcttatggtggggtatgacaggtatgagttgggggcacagatgtgcaagcaggaggtttgactcaataggaggcacaaaaagtaagaagccagggcaggcaacttgtgggaacacccagcgtcctcaccatgcgggccttgtccacgtagcggcggtatcgctcctccatggcccgcaagtccgcgtccttcttctgcaagttatgctgcagctcctcgatccgccgggctgctggcggaagaggtggcccatcagctccacgctgctgggctctgggatctccccaccctctggtcactaggtcctacttactgctgctgtcagtgggtggctccagctcctcaatgtactcccgcttcctctgcaactccagatctgcctcatgaagcttctgcctgtgggccggggatgagcagcagtgggctgacctccgggctggcttctcttttgtcccagtggtagccacagacctccccgccagccagaaatgcccctacatggccacagagccctctctgcctgcccctcatgcctggggctgtgtgccctggtcccaccggctccacagctgtcagagccacaaccctccgcacccttagcaggtatgccccggaacagcccctgctgtccacttcttcccatcccacagctcccaagctggttcagccaccatcttcccttgctagcttcttctactctcaagcactccatccagcagccagggatctttctagaatacaaatctcttcaatagcagacaggtaaaagaaaagaaagcaggccaggcgcggtggctcatgcctgtaatcccagcactttgggaggccaaagcgggtggatcatctggggtcaggagtccgagaccagcctggccaacatagtgaaaccccgtctctactaaaaatataaaaaatcagccaggcatggtggcacatgcctaagaaactccccactaatatcaaatccatgcccccacgaggagttccctctttctgcgacttacaaatgttcctccagcttccttttcagcaaaatggactgggagagagaagaggcaaggtgagtgggggatccagagaggccctaattcttccttcccagggtgagggtagggggtgccatcctgggcccatggtacttacaatggcctgtatggggcatcgggcagcatgggagagagaggagggttacttcggggcacaagggagggccaggctgggaggtggtgggtgacactcacatcttcagtcttgcccccctgctcctgcagggctttctgcaggtcctccacctgggcccgcagctcggatagctgctgctggttcagcctgcgagggtggggggccgcttagtgcctgtgcccacttttggccccctctgtccctgctccgcgcaggtaggtccccaggcgctcaccggtgctgcgtctccaacccgtggcgcgcgcggttggcatcctccaggtggcgctgcagctcctcctgccgctcccggtcggccgcctcctgcctgcacagccgcttgttctccagctgaagccgcaggagcgtctccctgcagacccgggaggagagagcagggccagggtcgagtcacctcgcaggctcgctggggctcagggagagtggagctaggggcgggacagagccctggggaagagcccagccagaccatggggttggagcaccgaggacctactacgggttcaggttcccggcccagggttaaagtggacggagctctaagctgggatagtgggtggggctaggcaggggcggagctacaagagtggattcgaacagctgggatgggactgctggaaagcgggaagcagaaatgggaagaactaggatgggacagtttttcggggtttttttgtttgtttgtttggttagttttggctttttgtttgtttgagatggagtctcgctctgtcgcccaggctggaatacagtggcgcgatctcggctcactgcaacctctgcctcccaggttcaagcgattctcctgccccaacctcccgagtagctgggactacaggtgcgtgccaccacacccggctaattttttgtatttttagtagagacggggtttcaccgtgttagccaggatggtctcgatctcctgaccttgtgatccgctcgccttggcctcccgaagtgctgggattacaggcgtgagccaccgcgcccggtcgtttttcgggtttttaaatcatttttattttgtagagagggccactatgttgcccaagctgctctcaaactcctgggctcaagtgatcctccagcttcggccttccaaagtgctgggacttagaggcatgatccaccgtgcctggcccggggtgggagagttaatcccggcagggcacaggggactgaaactcacagaggttacactaacaggggtggacgctgggggaaaggatcaaagtcagcggggctagggcataggatttttgtgcaggaactggagccaggtgttggacataatttgtgtactaaggatagacccttgagaggcaaagtcatctggtagggctggacagagccaaatcaggagtaagtgggcctaggagcccggctggcacctggagctgagaccaagcaaccggggctagcagaagatgggagggcgggagcggggctgagggcgggccttggcaagcctgggtggggccagagttttgagtgaccccaggatacctgagctccgcaggcaggatctctgcggctaagttatccacgggtgtggaggtgggatccagtgagggatctgaagaatgcgagaaaagtcttcaggtctcttcgcatcccctgtccccgcccctagggtcttcttcccaaggatcatcttttggggcttcaagttcagccaacagtctggcttgacacaagctccatccccggcttgatagagaaccgggagggttggccaagctttttagcctttgctccaccctgagaccctgagcctctctcttcaatttgaccgtgtcacctctttctggtcacctccagcctggcctagctctgtccccaacctagacatgcactgggacacaacctgttctacccaaacagtacaccaggacaggtaagaccccgggatggggcttcatctcaccggcctgggtcaacccccgcggctgcagctgggcgcagcgcagctcctcattggcctcccgcaaggagtcccgctccgccaacagccgctgcagggacagggtacaagacactccacgggtcaggctcggcctcctgggaaatgggctaccccagaattggcagggtggggcttgggcagtggaacctcagcctcacctccttctcctttgtcaccgactcatacttttcctccaggttgcggcattcaaatagccatttctcggccttcatggcctcctcctgccgctggccctgcagttcctgcacctgaacacagagaggggaggaataaggacagcagggctgggagcaggggcaggggctgagtacaaatggtccccgatccaggatgctttgacttattatttttttgactttactatggtgctttcagctgtgtatgtttttgcttgttttttttagagacagggtctccctctgttgccctggctgatctcaaactcctggcctcaagcagtcctcccacttcagcctcccaaagcactgggattacaggtgtgagccgttgcacccagccgactgtgaatgttaatagtaggaacccatacaaccattctgtttttcaattgcaatgaattagtcttcaataaattgcgttatatagtcaacgctttattataaaataggctttatggtagatgattttgccaaactaggctaaggtaagttttctgagcatgtttaaggtaggctaggctaggctgtgatgctcagtaggtaaagtatgttcaatggattttcttttttaaaaaaaatttaaaaatttttattttttgaaaacagatggaatctcgctatcttgaccagggtgttctcgaactgctggcctcaagcgatctcccatctcaacctctcaaagtgctgggattataggcatgagtcaccacgcccagctctctttttctttttctttttttaatatcttttacttttttcttttgagacagtctccctctctcaaccaggctggagtgcagtgatgcgatcttggcttactgcaacttccacctcccaggttcaagctattctcgtgcttcagctttctgggtagctgggattacaggcgcgcgccaccagcccggctaatttttttttttttttttttcgagacggagtcttgctctgtcgcccagcctggagtgcagtagcacgatctcggctcactgcaagctccgcctcccgggttcacaccattctcctgcctcagcctcccgagtagctgggactacaggcgcccaccaccacgcccggctaattttttgtatttttagtagagatggggtttcaccgtgttagccaggatggtctcgatctcctgacctcgggatccacccgcctcggcctcccaaagtgctgggattacaggagtgagccaccacgcccagactaatttttctatttttaagtagagacagggttttgctatgttggccaggatggtctcaaactcctggcctcaagtgatgtggggttacagaaggagttatggggtgcccgccttggcctcccaaagtgctgggattacaggcgcgagccaccgcacccggtctttttcttttgtttgagtcagggtctcaccctgtcacccaggctggaatgcagtgatgcagccacagctcactacaacctcgaaatcctgggctcaagtgatcctcccggctcagcctcccaaagcgctgggataccaggcctggcctttatgcattttaggatattttcaatttaccacgagttttgttacatggttaggtagccccaaggaaatcaagcagcatggtgaagcggcgggcatcaaagaatttagaggagcggtacttaagggaagggaaaggctgggcttactaacccagacagaagagcagcgtgggtggagggaagaggcccggagagcgtggcctacgtacaaataagggaggggatcaggggtgggcggagggctggccaacggtgagagacttgctgccaggggcggggccccggccctaaccccgcccccgccgcacctgccgccgctgcgcctccagctgggcgcgcagggagcccgctcggcgtagctcatcctccagttgtcgcgtgcgctcggcgtggccggcgttgcgttcctccagctgccgcacctgccgccgcagctccctcagctcgcccaagcggcgccggcaactggtcagcgtggcctccagctgcccagcacgctccgaagactgcctaggggagtgggagggaagggggagggctgagagctctgatcaggggtcagctgggatgtggagtggcccttggagcacagggtgttgttcagcctgaggcttttgggttcaaggtgaaggggtcatgaaagttgagggttaggggtcaatcagggcctggagctgttgagagtcattacagcaatggttagcccagggttataatcaggtatcccctggggtggaattgtggggacacagagggtggggttatagggggagtgatggggagcctagagaggtctgagcatctgccaaggataccttggagtcattgggggaggtatgggacaagaggactgcggggtccttagaagtgcaattggggggtgcactagtaccttcgcattacagagatgctataggggcccagtggagccctttgtggttacagaaggcacagtagagtcaaaagggggtgcaaagtaattgcattgtggagtcctagaaggtaccatgggatccaggggcattatgaagcccaaactgtgcagtgggatctgcagagcattgtaggggaggttcttgtgttttggggggccacagggatgctatggggtcttggaagcatactgtgggataaggggggggcagtgtggggtccaggggatatggtggaattcaggatagtgcaatgtggccttgggcgttctgtagggctcagggtggcactgtggagtccagggggcatattgggggttcactgggcacatgaaaattacagagctgctatggcatcagaggggaactctggaaacaggtttaccccccgccccccgtgatggggacccaggaacccaccactcaccgtagttcatccatctcatccttcagggcctgtgcctcctgggccaggctagtcagcgcctggttccggtgctgcagctccgcaacctccctctccagctcggcacagcgcaggcgctcatcctccctgccactctccagcctgggggtgttgggggaagagcacatgagggggctgccctcccccggtcccctggcttgcctggcccagtccccagctgaccacacctgaagttctcctcctgcaactgctccagctgggattgcagcagcagcagcttcttggcagtgagacctggggtaccctcgccttcaggccggcccatccgctcccgcagccctgcattctcttgcgccaggctctgcttctcctctgacaggagcatcagctgcgggcagggcagaaagatgagcttgggcttggagaggggctactcaagtgaccctgccccacctagggccctacctgccgctccagatccagacagcgctgctgtaattcgtccccctcctcagcctcctcacttaggaaatagtacctgcgggactgcagagatgagggggaagaggaactcagggattcaggagaaggacggggggagggaggctgagatctctagaggccaaatggagggggccaagaaaccctcaggattgaaaagagggctggcgccgggtgcagtggctcgcgcctataatcccagcactttgggaggctgaggcgggtgggttacctgagatcaggagttccagaccagcctgcccaacgtggcgaaccccttctctactaaaaacacaaaaattagccgggtgtggtggcgtgtgcctgtagtcctggctactcgggaggctgaggcaggagaatcgcttgaacccgggaggcggaggttgcagtgagccgagatcgtgccactgcactccagcctgggtgacagagtgagactccatctcaaaaaaaaaaaaaaaaaagaaaaagaaaagaaaagaaaacagggctggggttggagactgaaggaagagcgattccagaacactggagacctggtacaggaagtggctagcaccctggaagatgggcgtggcttacaggcttaaggacaagcccctcccccttaggctaccctgagcatctgtaagtggggtctggacctttaacaaggttaagtcacaaggttaatcacagcaaacttatccccaactcccggcctttggatttgctgatccctgtgcctggaacacctttcccccaaatctcttacctggctgtcaaagttgccatacgtctctggtgacagggagtcaggagtgtctttggtcatgagctgaggagtgggaaggggcattgtaatgaactggatatctgaggccagccttcaaagtatctactatccaacctgagaacctctccatcctcccgtcaaggccagttctgcccaataaccccagcccagaggctgccctcctgcctccaacacagagggaagccagatcccttgagcctgctagattgcgacttagagctgggaggagctggcagacacatgagacagagatgtctggccagctgagttccaggcagagtccagaccttaccagggcaggacctgtgcccagttctctctgccctagagatgtcccctctcctgacattttccaattgcacactgagtgcccccacccacctcttggatggcttccatcaccacatgctgaaccgattcttccagcgtcatgattctctggatgtggtctggggatcaaggtgggggaggctgagacccaggggtgaggtggggaggaaggaggatttcctcaggccagccctggggaccccctaagctccccataccctgctttttctcgcaactgatggcacagcccagcaccagctgaagcagcttgccgagctctgccgggtctgagaactctccaatgaggctcacatctgggagatgctcttctgacacaggatgcgccaggacctggggagaagggggtgtcaggggctcatgggcccacccttctcccaactcaaccccctgaatccctttacagttactcacatcctgggagtactctactaggctccgtaagaccatcttcagattgctgacctagggaggaacaaggaactgtggacaagttcagaggcctcccactctgaatctgtaggtcccatcctctctccacctcacttctccttccctgctcatctcatcctattctgtctgcgtgcgccttcctctaggggtgacctgtctggctgtctgccccttttgtctgcctgaccatctttgtttctttttttttttttttttttttttgctttagctttttaagacagggtctggctctgtcacccaggctggagtgcagtggtgcaatcttggctcactgcagcctcgacctcctggggtcaagcaatcctcctatctctgcctcccagtagctgggactacaggcatatgccaccacaatcgactacttttttttatttgtagagaggaggttttgctatgtagcccaggctggtctcaagctcctgagctcaagcaatcctcccacctcagcctctaaaattgctgggattacaggcatgagccactgtgcccggcctgcctgaccatcttccttcatatgtctccagaaccaagtcacttctcaccacctgccccaccatccttcagccctacccatccatctttacctctcacctggattagtgcaccagctgcctctcctcttccacttttgctgcctacattttatttctctccatgcagccagggggagctttataaagcccaagccaggttgcatctttgctctgctaaaaccctgccttgactttccacagcacttaaaaatagaatccacacccccaccatggcctgccaggcccctgatgacctcatctcctacaaatcttgccctcttgctctgttctgccctctctgccattcctccatcacaccaagtttattcccaaatcacggcctttacatctgctattccctatgcctggaacaccgttcccccaaatttcacttggagattaacccatctgatgtaatcagccacctatgccctcattgctctctctcaaagccctgcttttttgttgtcttcacagaactactggcatcaaaagttttttctttttctttttctttttctttttttcttcttcttgagacaagagtctcgctctgttgcccaggctggagtgcaatggctcaatctcagctcactgcatcctccacctcccaggttcaagtgattctcatgtctcagcctcccaagtaactgggattacaggtgcacaccaccccacccagctaatttttgtatttttagtagagatggggtttcaacttgttggccaggctggtcttgaactcctggccccaggtgatccacccactttagcctctcaaagtgttgggattacaggcatgagccactgcgcccagcctggaagttaatttttatggttgtgtatgtgttgcttgtcactagaatgatggctgtgtggggcaggtttttgtctgtgttattccttgctgaatgcccaggcctggcacagggtgagtactccatagatgaatggatgaacaaatggttgatcaccagacatctgtccctcttcctgcccatcacccaggacatgtgcctagctggcccgtccctggtcatctcttcaccagtctgtcctctaatcaggagtccacttgtcaccttcagcttccagttgggacctggatcttccgagatgccctggagccatgcctcgttgaaccaggaggggtctctgggggcgagaaggtgggatgagcagactgggggacacttttgggatcctccccttcagctccactcacatctggttcagcacataggctacggcaaggccgctgctcaggtcctgagggctggcacagggagacggaacgtggaacgtctgtaactgaggggtaaaggaaaggacaaggaaagagttagggcctgggagcgccgaaccgctccccttttgcagacttttccagtcagcgaacctcacatggtggggcgggcgctgctccgccacagcagctctgcgagggactggcttctgctcacctgagaccggagggggcgtggcctcacctcacctctgcccaacaaaccctgcgcgtccaggccagggtggtatcgcgagtcacctgggccccacaggcaccacgtgaccaggccaattcacctgtgtcctcgccccacgtgaaccaaccacagaggggcggggcctcacctgtcctttccacgcagacttgccacgtgacgggggcgggtgctcgggccagagtccaacggtccagcaagtcgacgaccccgcacctcccagccccagcaccaagagactgaccgaaccagggccagggatcccgggcaagaggagcgggcgctcaccttcccctagccccgccccacgacctacccaggtgagcagagacccgcatagctcagctttgtccacgctcatggctcccgatcggattcaatccaggccacggagccccggcgccgcagcagcctccgggtccgccaccagcgagcgcccgcagccccgacctcccgctcggcctagagcgccgccccgccccgcccccctaggcgcaggccccgccccgcccccaagcccaggctccgcctcggaacgtaatctcctccctacgcccgctcttgcctccagccccgccatcttggatccgggcaccgttcgggcgcccgccctgccgctaggggtcagcctggcccagccttgtgcatccgagggtggtcccacctcccatcctcgccctggccctttttggggtgggaggtcctcaagatccttttgagacggaggtgctccaccctgttacacaagcgcattcacgtcttttccctgcaacttaagtaaattctttttttttttttttttttttttgagacggagtctcgctgtcgcccaggctggagtgcagtggcgcaatctcggctcactgcaggctccgccccctggggttcacgccattctcctgcctcagcctcccgagtagctgggactacaggcgcccgccacctcgcccggctaattttttgtatttttagtagagacggggtttcaccgtgttagccaggatggtctcgatctcctgacctcgtgatccgcccgcctcggcctcccaaagtgctgggattacaggcgtgagccaccgcgcccggccttaagtaaattcttgtgtctaaccactttataatcggagccgttgtgcggggaggggcgagccctggcactttctatggactgggagaggggatgctaaaggggttttcccgccggacgcggtggctctcgactgtaatcccagtattttgggaggcctaggagggagaattaatttggatagaagttggagaccagcctctcttcaaaaaatttaaaaattacccaggtagcggtggctcacgcctgtaatcccagcactttgggaggccgaggcgggcggatcacgaggtcaggtgttcgagaccagcctggccaacatggtgaaaccccgtctctactaaaaatactaaaaattagctgggcgtggtggcgcacgcctgatttcagctactcgggaggctgaggcaggagaatcgcttgaaccctggaggcggaggttgcagtcagccgagatcgtaccactgcactccagggggcaacagtgcaagactcctcaaaaaaaaaaaaaaaaaaattagccagacatgttggcgtgtttctgtggtcctagctcctagctctacagaggctgaggtgggaggatagcttgagcccaggaggtcgagactgcagtgagccgtgatagggccactacactccagtctgggtgacagagcaagactctgtctcaaaaaaaaacagtaaaaatttaaaaatagggccgggcgcggcggctcacgtctgtatcccagcactttgggaggcctaggcaggcggatcacgaggtcaggagatcgagaccatcctggctaacacggtgaaaccccttctctactaaaaatacaaaaaattagccgggcatggtggcacgcgcctgtagtcccagctactcgggaggttgaggcaggagaatagcttgaacccaagaggcggaggttgcagtgagccgagatcgcgccactgcactccagcctgggcgacagagtgagactgtctcaaaaaaaataaataaaataaaataaaataaaataaaatgcctggcgcgatggttcacatctgtaatcccagcactttgggaggtcgaggagggaggactgcttgaacccaggagttcgagaacagccctggcaacacagcgagactccgtctctacaaaaataaaataaaaaataaaagtagctgggcgtggtggcacgcgcctattcccagctactccagaggctgaggtgggaggatcgcttgagtccgggaggtcaacgctgcagtgagccgtggtcgcgccactgcactccagcctggacgtcaggggggagaccctgtttcaagaaataaataaatgaatggatcctccctgcattattgactccagcagtagataaggggacacgggtatggtcctaggtcgagaagaggtcagttagacacacatgtcctggctgatggataggcacccttgcccagcctggatccgtcttccacgatattccccccgcgccttgccctccccagatgcgcgcccggcatcacccccacctcagaacccaggatttggctgaagctgccgcgtcgcccgggcccaccagggggcgcggagaccgcagaacgcggcctagggggaagactgtgcgcccgccctgaaaccccggctggggcggtggagcgggggtcaatggaaagtgatgggaattatagttaacaataaattgcagtcaccatgtatggagtgcttactgtatgcagtccttgcgctaagcgatttaaatacatagactattgaatcctccccatgtctccagatggcaagtgctgttttaattccctgctttgccggcgagaaaacagaggttccgagtggaccgggttttgaggggaagggtgaagcccaggctcgcgccctgtgaccccagggtccctctgcaacccctccccggtagacgggcggggtaatgtgcactaattagaggttattagctgtacccagagggaggggcgggctctgcattgggggcgggcccagatcggaggggaggggcgctgctcccacccacccagaagatcctggcgccagagaccttgccccggagcagggtgggcaaagtgacagctgctccccgcgcgcatcgcacgaacgcagtcactcacccccagacacccgattacagcccactcatgcgcagccgtacgcacccgggggcctcggatgctcgtccatatccccacaacctcctcccgcgtggttttccagactccagcccctgggagcgggtggagaggatagtgggggaaggggacaagggccggcagcgctggcttccggactgggctgtcttccggcggtcgtgggaacagctgccgttggctccccgacctcgcattcaccagaggagagggtgctgccaatacagggaaacagggccaccccgttcccaggtagcaatgggaggtgagccaggaaccacagctgttacaagcatgggtggctggacatgctgagatcaccacattagggcgggggtcgcagggattttgatgtttaggggaaatctggaaatccaaatatttaggcaaattgacttaaattgtgctaatgttggcgtgatgttgtgggcgtcccagatgttcggggagccaggagtccccagacttaaggaaaatctgggtgtgctcaatttgggggaggagcataaccctccattttgcggcggcagggagtcccacatttggggaaaagcagtgagcttctatgtcggcggggaagacagcagcaatctctgttttgaaacacagggagccccgctgtgcggagatccaggcacctttaattcagcaagaggggctgaaaaaccctccacattttggaagaaggatccaaacccctgttttaggtaaagagagcccccaacgttttgggggatggtctgaaggccgccatttgtagggacacagagccctggtgtgcaggtctgggccagcagcccccagctggattggggagcccaccccctctactggtttccaggaacagctgggcccagcctaggttgtactgctgggaagcggctgactcaacccctccctgtggccacagctggaccccggcctgccccctccagcgttcacatctgggcagggatccagtcttcatcagggctgagaaggggaccctcagtcccacaactggagaacagtgcccctctgccactcccctggctgaccacagccactgggtggactccatgcatcatcaccatggaggactctggcaggccccctacagcccagatattgacatcctgccaggaactcctagccagtcccccctccctgtgtctgtgtgtgtctgagtccatgtgaaatgtgctaggtttttttgtgtttttgagagaaagggttttgctatgttgcccaggatggtctcgacctcctgacttcaagtaatcctcctgcctctgcctcctaaagtgctgggatttcaggcgtgagccacggcgcctggccaaatgtgctggtctttgtaggtgtgagatggaggatctgtgactgtgtgtacacgggcatgtgtcctgcatccattgtgtcataaggccttcgagtttgtgcaacaggctgtgcctgatttgatgggggggagggctggtttcggggactgggggaggggaaatttgtaacatccttgtcggtaacatccttgtccgtaacatccaggttggggccgggcttggtggctcgcgccagtaatcccagcactttgggaggtcaaggcagacagatcacttgaggtcaggggttcaagaccagcctggccaacatagtgaaaccctgtctctactaataatacaataatcagccaggcgtggtggtgagcgcctgtaatcccagctactcaggaggttgaggcaagagaattgcttgaacctgggaggcagagattgcagtgagccgagaacgcgccattacactctagcctaggtaacaaagcaagactccatctcaaaaacaacaacaaccaaaaaaacccatccagattttagggtgactagggaacctctagtgtgtgcccctgtgtatctctgtatggtccaggcagagtttgggtggggctctctcactccaattgcatcttcatgtgttgtgtgtctgtgtctactatatacgtctatatgggacctcactttgggtctatatctgtgtcattctttttttctttttctttttttgagacggagtctcactctgtcacccaggctggagtgcagtggagcgatctcggttcactgcaagctccgcctcccgggttcacaccattctcctgcctcagcctcccaagtagctgggactacaggcgcccgccaccaggtgtggctaattttttgtatttttagtagagacgaggtttcaccgtgttagccaggatggtctcgatctcctgacctcatgatccgcccacctcggcctcccaaagtgctggattacaggcgtgaaccaccgcgcccggcctttttttttttttttttttttttttttttgagacagagtctcggccgggcacggtggctcacgcctgtaatcccagcactttggaaggccgaggtgggcggatcaggaggtcaggagatcgagaccatcctggctaacacagtgaaaccccgtctctaccaaaaatacaaaaaattagccgggcgtagtggcgggcgcctgtagtcccagctactggggaggctgaggcaggagaatggcgtgaacccgggaggcggagcttgcagtgagcggagatggctccactgcactccagcctgggtgacagagcgagactccgtctcaaaaaataataataataataaatataaaaataaagaaaaagaaggctgggcgcggtggctcacgcaggtaatcccagcactttgggaggccgaggtgggcggatcaggagttcaggagatcgagaccatcctggctaacacggtgaaaccccgtctctactaaaactacaaaaaaattagccgggcatggtggcgggcgcctgtggtcccagctactcgggaggctgaggcaggagaatggcgtgaacccgggaggcagagcttgcagtgagccaagatcatgccactgcactccagcctgggcgacagagcaagactccgtctaaaaaaataaaatataaaaaaaataaataacgaaaaagaaaaagagacagagtctcgctctgtcgcccagtctggaatgcagtggcgccatctcagctcactgcaagctccgcctcccgggttcacgccattctcctgcctcagcctccccagtagctgggaccacaggcgcccgccactacgcctggctaattttttgtatttttagtagagacggggtttcagtgtgttagccaggatggtctcgatctccagacctcctgatccgcccgccttggcctcccaaagtgctgggattacaggcgtaagccatcgcgcccggccgtccacttgacgttttgagtgtccctgtacgtggtcttgtctctgtgactgtatcccatttcgtgccccctatttgtggtaacaggggtcatgcgatggcatgactatcttatgtgtctgtatgtatctctgtgccaccacaatcaccatggaagaagtgtggctgtgtgacaaaacaagccctggtgtgcaaaactgtgtccctccctgttcctgttttttttttttcttttgagacggggtctcctgtgtcgcccaggctggagtgcagtggcacaatcgctgctcagtgcagccttgaattcctggcctcaagtgatcctctcgcctcaacccccacatacctgggactatagacacgactataggcatgcaccaccatgcccagctcattaagaaaaaatatttttgtagagacaggggtcttgctatgttgcccaggctggtcttgaactactggcctcaagcgatcctctggccttggcctctcaaaattctgagattacaggcctgagccactgcgcccgtcctattttgctggatggggttgctttatcaggatgtatctgccacctacctatgtatgaatatggctctgtttgcgtccctatcacaaacgctatgtgactgacgtgcctgtgtgattgtctgcgtctccatccacgtgtgtccgtgttcgctgcgaggctggctggactagaatgggttggtgccaagatgtggcaggtgtatcctgcgtccgtgtgacactgtgggtcggggagtttgtttgtgactttgtgtgtagggggcgggaagtgggagtcaaagtcacagaggacagcaggctgcgcggacgcagtgatgtgcgcagagggcctcccgccccgccgttcccctccgggaggcgccctccccgcgttgcgggggcgcgtgcgtcgtgcgtgacgtgagacacgacgggggtcgctgcgtgcgtggaacccgacgcggtcgtgcgtgcaagcgcggggggtggaagggcgggagctctgcactggctgcgtgcgcgcgtgcgtgggcggtggcgggggctgggcgagcggaggcgcgcagggcaggaccagccccgccccggccgggaccttggggcgccggtgaaacccgggagggggcctccgttaaccccttcctgcccgatccgaaacttgtggcccctcgaccgagcgcccgggggcttccccagcgcctgacgggagggcagtccctgttgggggagggacctttcccatggagctgagaccccccccccagttgccatgggaaccagagcttcccgcgtagccaggcgcgtgtttcctttccccgcccagccatcctgcttttcctccagctgcctagtctactgacaatgcgcttcccgctcgtgatcccgggagaagggggctggggtcagcgtcgcccgggcgtgcgtgactcaggccagcccgggggtcccctggccgcagctggcctcgctcccgcttctccgcccccgtgactcacccctcccggctttccccgcgtgtgactcaggcccctggggagggggctgcggagtctgggacccctacagacagtggggccgagaaccaagttctggggacttcgctctccgcggggaaggcctcccccaccagcgagcatccgagggccagcgactccccttagcaagccagaggcgccccccccaactccgcctctgaattggtagaccccccacccccacccctgcaaacctccgggaacccagcccccaacccctcctcccagcccacaggaagttttggcagagcccgtcgcggcgatgaaacggttaaagccgttttcttattcatttcatccaggggcccattttgactcagagcaagccggcgcccccctcgagcctggcctcctgggggcctgggtgcatactccaccccacatgtaccatttttagagaggggaggatggcgcttggtgagctggctgggggtcttgggtagcatatagagctgggttcaaatcctgtctctgccctcattgctgcctggacctcagtttccccatctgaaaatgagggatcattatgtccagcttgttgggttgttgtggggattaggtgaataatagatgggaaactctgcatccagggttgagcacgggagccagaagagggctcctcctgtttctcaggcctgggtgtcagggtgcccagcagaagcgagtccttgccgggcaggccatgccccacccagacactctaaggccatggggttcatcttgtccaccccctgcccgaggcaggcacccaggaagtgagaggcggggcaggaatgaggcacaacctgttgggcccgtcacctccccgccccccaccctcattccagtgccctgagagggcccccccacgctgcagccccacccccgccgccctggacgcctgggtcctgacccgcgggtggcccgagggaggggacgtcggatggagactgtgtctcgggaacatcctgtggactgctggctggacagacggaggagggtcagcccctcccggggcagggcagacattgactgggggcagagtaaacatggcccagggtgaccagacagggggcgggcggggggctgtaggaatgtacacacagtcaccccgagagagccagtccagacacacaaacccctgtcaccttggccacagagagactgccagccagggacacacagacagggtcagacatacagctgggtaagatgatccagcaatgactgtcacacatggacacagtgacagaccagaccctcaagcaagagacacacaccgtcaaacacatgaacgcatccactggtcaaaaatacgcaggcaggccgtgtgcggcggggataaatcaacccagcacataagcatgatagacacaaacacacagagactgacattcaggtgagaggcacacagcaaggcagacacaatggcgtgtgacacacatggagacaaacacaataggctagaaacataggggcaagacagacacagagtgaactatatgtgagacaagcaggcaacatgtgcatgctgataggagagacagtcactttcagcaccagcaccccgagagccacacgagagatatgcagacacaggcatgcactatcagatcctgacacgcaagagaaggcaacacacacacaccccagatctccaactcagaagatagagacaagacaagagagacaaacctagggacagagatgatgtgttcacagtatggcagagagtccctggcaccctggcccaccactgttgcacacacatcagagatgctcccagggacaccaagccgaagccttagaggtacacaccatctcaccaggaacacacacatgtgggacctggcaacagattgggtagatctgggcagactgacacattcacagacatggtctggccagacagtcacacccagtgcagagaggcacagacaggccacagtgggacattcataaacacatcggcacagaaagaccatgacaaaacctgtttgcacacacacacatgcacacatacaaacggagatcagtaacaggcaacatacagatcagccacagaacacacacatggaaacaagccacagacctcacacacagagaccacacacacacaccaaacacaaaccagccacagacctctttttcacacacacacacacacaccagatcgtatacacacatacatacagaccagccacagacctctttttcacacacacacaaatgcacattacagatcgtatacacacagaccagccacagacctcttttacacacacacaaacagatcatatacacacatacagaccagccacagaccacacacacaaacacacatacacaccgacacaagttagccataggaactttgaaacaacctacacgtacatacatctagaccatgtgcaacccatcctatagagctcacacacacacagagtggaacagaactctacacagataagccctacatagacctttgcatccagggctgggcacagaagcgggcagagggctactcctgtctctcaggcctgggtgtcagggttggaccagcacacactctcacatgcaccctataggccagtcacacgcttgccccctggaccttgccaaggttctgtgggggcactggacaccccagtctgtctctgccccacagagatcctggcacttcctctctccaaacatcacccccacttccctccctctttgcttttgccacttcccctaggaggcctagctcagcagcctctgctcctgctggggtgggggcctgctataaagaggtcacccagggtcttggtgatgcccaggtcccccaaggcttcaccagcagtggcagggatggaagcagcttcctgagaaactcccctcatgcccaaccatgtcagcctggagagagagaaagagagagactctccttcctgcttccaagaaaacctagcagcttcctctccaggagagggggcaaaggacccccaaaccacagaggtgggagagggaggcggctggtaggccaggagttcctgggggagggctcctgccgggcctcagatccacacccaggggcagggacacgggagggaggctgggtgctgtgtgctgcgatttgtgggttctcgccctggcctgcccactggctgactcacaggcagcccccagcccagtttcctagtgagggccccactggtcagtggggccagcagggaggggggtcaccgggctatttataagaaggagaagtccctcgtgccaagaccaaaagccccgaagacacttgtgggtgggggtgggtgaacttcctccttatcctgtgccctaggccccaggccctggggcactggggaagcctgcgcagggacttcttagccaggtgctggtctggagcccagggcctgggcagtacccagctgccagtctggacgctcaggccagttgggggagggggctgttctcccaccctcctcgtggggccggcctggcgccagtggggcggcttgagggggtggtgcccaggccacaagggtgacactggcagaggcctggaaccggctgtaccagcttggctgggcccccgccctccctgtctggcccaatctccaccccgtgctcaaacacccatgcagagtgtttggaggaaccctactcccacatgctggcctgtccacagagacccgtgcccctctgtctgtgccccaccacatttctcccccaattaaaggagaccctcagtggggtgcggtggctcacacctgtaatcccagcactttgggaggcccaggtgggaggatcccttagggccaggacttccagaccagcctaggcaacagaatgagaccctgtctcaataaaatataaaaaaataaaacttagcagttgtggtgtgcttgtagtcccagttactctggaggctgaggcaggaggatcgcttttacccaggagttcagggctgcagcgagctatgattgtgtagctgaactctagcctgagcaacagagtgagatggtcttgttttgttgcccaggctggagtccagtgtcaagatcatggctcatgtgatcctcctgcctcagccttcggagtagctggaactacaggcacaccctcctgacctcagctaatttttaaatttttttgtagagatgggggtcttgctgtgttccccaggctggtctcaaaaatttctgggctagggctgggcgaggtagatcatgcctgtaatcccagcactttgggaggctgaggcgggcagataacttcaggtcaggagttcgagaccggcttggccaacatggtgaaaccccatctctactaaaaatacaaaaaattagcctggcgtggtggcatgcgcctgtaatcccaactattcgggaggctgaggcagaagaatagcttgaacctgggaggtggaggttgtagtgagctgatattgtgccactgcactccaccctgggcgacagagtgatattttgtctcaaaaaaacaaaacaaaacaaacaataaaaaaaaactcctgggctcaagtgatcctccccctcggcctcccaaagtgctgagattatagacgtgagccactgtgtttggccaaagtgaggttctctttaaaaaaacaaaaaaagggccgggcatggtggcccacgcctgtaatctcagtactttgggagactcaggcgggctgatcacaaggtcaggagttcgagaccagcctgaccaatatggtgaaaccccgtctgtactaaaaatacaaaaattagctgggcatggtggcatgcgcctgtaatcccagctactcaggaggctgaggcaggagaatcgcttgaacccaggaggcggaggttgcagtgagccaacatcatgccattgcactccagcctgggcgacagagcaagactccatctcaaaaaacaaacaaacaaacaaacaaacaaaacaccaaaaaaagaggcccttcatgagacggcctgcagctggtactgcatacatgcttctctggttgtcattattcacaacacagtggctaatgctctgaagccagacagcttggattatatctcaactctagtgcttctagctgttggacaccagacaagttccttaatctcctgtggctcagtttctcatctgttacatggggatacaaataacatgcattttgctggattgttggaagcagtcgatgacttattttatgttaaccacttagaagagtgcctagcccacagtaagagccatgtaagtgttggctattaaaataataattattatttctcagcctatctatcttaagtgtttctgagtctcactgtctgcgtgacactaaccttgaacccatttgtctctctgggcatctctccctgccctgcgcccctgcccccatacacccactgttccttgccctcctcctgggatggactctgtctgggatggcctcacctctctctaggactccctctggcatggccagcctcagccctggccagggctgaattactgtggcctcctggcttttgggacctgcaagttagcttcccaaggtgctgccctctggcctgccctgccctgcccaaccccccaacgctgcccgctgcgcccccgcggggcccagccagatgtcagctgcagttattagcctgggcgggagacacaggcctggcagtgtgcctgccagactcacaggcctccggaatctcccttgagcctggggagggggaggggagccattcaagcaaggggaagaagggagggggcatttaggggtcacagggaccctccaaggacgggacgcccccagcttctgctgggaccttcctccagcaaggccactgcactgctggacttccccctgcccccacatagctcagtttctttttcgcctctttcgttttccttctctttcccacacttggtgagatctaggctgccccggaatggctgtttaacccctatcccttagcctctttctaccctaaagaagagagaggctctcttcatcctccagaagacagaggcctgggaagctgagagagagagagagagacaaagagagagagagagagacagagacagagacagagacactaggcttctcacctcttggtctagtgggttcacacactaactgctcggaagtcccaccttaagtctaactggaagcctgaccgtctgcacctcgccgcagcccttcccgggaaggggctctgggttccctcatattctccccttagattttcaggtcttctctgactcggggagggaagctctcagatgacagagctactctagggaaggaggggggctccctctaggtattctggatgatagtaggatgggacctgcagactaaaacgagagtggggcccctgactcacatgagtgagtggggggtgttggggacggagctccagatctcctggcagaagggaagggcaccccacccgagggaggaggcagccgccgttccagcccgcccaggcgccgggggcgcctcgaggcatcggcccgccctctccgcgccccgtcgggccgggggcgaagtccgacccaggcccgcgggcaggcggggacctgccgggctgggttgggccaggccgggcctggcaggacgcagccccaaagcggcggggtggggcggggccgggccaggcggccgtgggggccccgggggcggcggtcggggctggtcgggactagcagtctgggggcccaggcgcgccctgggacctggcagatagtcgggttccccgcttctggctcggggccccaggacagcgctggtcccacctcttcctgtgccctaatatgggcggcggggagagacttcgggggccggcccgcgctcagtcctgcccgcggactcccgcctgttgccatggcgaccaggccccgctcctcggctgcgtcccccgccgtcgggccaatggaacactccccaagccgcctgcctccgcggtcccctgcaggcaccgcgggcggaaccattgcttgaggggagaggatggtggctggaggctgccgcggctgggcgggctccaagcacccgggcctccgcgggggctcgcacgcccaggttcctcttccgaggcgcaggatgcggcgggacccagggcggggcgcacggtcccgtaggatccgagtgacggagacagggccgggctccttcccccggggctgttgccacacttcctgcctctgcgctctttccccagcctgtttctaaggaagggagtggggttgggcgaccgcgccccagccgtcgggctgggtccaggctctaggagccgacacggtgttgggcaaagcccagggtcaataggggagggttttaggatgggggacagagaatacagatgactaagaggttaccatcgagggggagcagcagtcgtggaagatccagcagtcctggtgcgcgggaccctcaaggccccctcctcacatgtcaactgagtaccctcttattgtcttctctgctccgaagatgtgtccggccccttctaactctctccttcatccgggctagcagatgaccccagtggtccccaatttctggcagacatgtctccatcttctacctggcatattttacctgcctcagtgtaccccaggccgcttactagctttctgcatatctagacttcccctaatgcctccttcccgcttacgggagagcctcagactctggactcagctcccatgagctcctggacccctactcatttcttgcaatttaatgggtcatgcagctccacccactcaccccttttgatctctcccctcctccgtcctgtgaaaattccagtcccgcatccttctgagcccgggacccccagtcaattcctgggtcaggtgtctccttaaccctcccgatttacagtgcttaaccctcatttctgctttttggggtctcccaatggattgtcagtcctcctacccctctcgtattctgggtacctcaggggtttcttcgcacatactgggaccctcaccccacttgctgcgtaccaggtcctggtatttgtcccagtggactccagggaaatcatcctcctccctgaaacccctcactcatgtgcctgggccccccagcacctccttccatgcgtaccccgaggtcctttgagcccctccccctgcagccccgccgagccacccggcccgtggccgctgtttacaaggacacgcgcttcctgacagtgacgcgagccgcctcctccccttccccacgctcgaggaggggggcgcgggggcccggctccggcgacggccaatcggagcgcacttccgtggctgactagcgcggtataaaggcgtgtggctcaggctgagcggctgggaccttgagagcggccaggccagcctcggagccagcagggagctgggagctgggggaaacgacgccaggaaagctatcgcgccagagagggcgacgggggctcgggaagcctgacagggcttttgcgcacagctgccggctggctgctacccgcccgcgccagcccccgagaacgcgcgaccaggcacccagtccggtcaccgcagcggagagctcgccgctcgctgcagcgaggcccggagcggccccgcagggaccctccccagaccgcctgggccgcccggatgtgcactaaaatggaacagcccttctaccacgacgactcatacacagctacgggatacggccgggcccctggtggcctctctctacacgactacaaactcctgaaaccgagcctggcggtcaacctggccgacccctaccggagtctcaaagcgcctggggctcgcggacccggcccagagggcggcggtggcggcagctacttttctggtcagggctcggacaccggcgcgtctctcaagctcgcctcttcggagctggaacgcctgattgtccccaacagcaacggcgtgatcacgacgacgcctacacccccgggacagtacttttacccccgcgggggtggcagcggtggaggtgcagggggcgcagggggcggcgtcaccgaggagcaggagggcttcgccgacggctttgtcaaagccctggacgatctgcacaagatgaaccacgtgacaccccccaacgtgtccctgggcgctaccggggggcccccggctgggcccgggggcgtctacgccggcccggagccacctcccgtttacaccaacctcagcagctactccccagcctctgcgtcctcgggaggcgccggggctgccgtcgggaccgggagctcgtacccgacgaccaccatcagctacctcccacacgcgccgcccttcgccggtggccacccggcgcagctgggcttgggccgcggcgcctccaccttcaaggaggaaccgcagaccgtgccggaggcgcgcagccgggacgccacgccgccggtgtcccccatcaacatggaagaccaagagcgcatcaaagtggagcgcaagcggctgcggaaccggctggcggccaccaagtgccggaagcggaagctggagcgcatcgcgcgcctggaggacaaggtgaagacgctcaaggccgagaacgcggggctgtcgagtaccgccggcctcctccgggagcaggtggcccagctcaaacagaaggtcatgacccacgtcagcaacggctgtcagctgctgcttggggtcaagggacacgccttctgaacgtcccctgcccctttacggacaccccctcgcttggacggctgggcacacgcctcccactggggtccagggagcaggcggtgggcacccaccctgggacctaggggcgccgcaaaccacactggactccggccctcctaccctgcgcccagtccttccacctcgacgtttacaagcccccccttccacttttttttgtatgttttttttctgctggaaacagactcgattcatattgaatataatatatttgtgtatttaacagggaggggaagagggggcgatcgcggcggagctggccccgccgcctggtactcaagcccgcggggacattgggaaggggacccccgccccctgccctcccctctctgcaccgtactgtggaaaagaaacacgcacttagtctctaaagagtttattttaagacgtgtttgtgtttgtgtgtgtttgttctttttattgaatctatttaagtaaaaaaaaaattggttctttattaatttctgttgtctttttttccaagctgggagggcggggggaaaaaaaaaagcactggtttgcccccagctcagtgctgttggtggctcggtcctgtatgtgtccccctcgtcggttcggcgcaggcatcttgtggtcccagcccaggagtcccacccttcccgcgtccccagatctccagggttggatggttggggcgcgggacgcggtccagggacccaggagctgaaggcagggtgctccggccgagacttggagtgcgcaggcgcgtccccgcccagccgcgcgcgccggggctttccccgctgacgcagcggaagcgctgcccatacaaggaccgattctgcccagtgacgcgaccgcggtctctgggcagattccgggaatcccctcccccgctctgccgggcagggccgcggcgccgggaagggggccgggattttcccgggcaggcggctgcccgggcacggaaagccccaggcctgggtccagagcgcccgcggtgggcgggcagcgctcctgggctccgggagccacccctgtgccaccttcaagacactggcgcctaggccccgccgcgcccacgccccctccgtctgacctgaccggggcggagggttgctgctgcctccgctgctttgccgacgccgtcccctctacccccaccccctccaggaagggcggcgcccgcctgccagtttcccctcacgggtgccaggccaggagcggggcgactgccaggtctggtcctgccggggcggctgctcgggccgctgggcgccgccaccgccctcgcgctgggctccctcccgcgcagctgggacacgtggaggtgggggtgggggtgctggtgctgctggcccgcctagagggagtctggccggcttcggggttggaagcccccagagcagtggagaaaaacaggtagagaaaccagacaggcagtagggtgagtggaacagacacttcatcaattcatttgtacaatacctagaacaactagaccctggagacacagcctggaccactccagacaagacaataaataaacaagcaaacatggttctttgggggtggtggtaagtgctagtaagaggaaaaaaacaaactaaaacaaacaaaaaaaaaaaacaaaaaaaaaaggtcaaggtggcaatgatggggcagggaggaaagatgctttgcagaatggagtgggaacatggacctttaatagggtgactttttcttttttatattttagagacgggtctttgtcctgttgctcaggttggagcgcagtggtgcaatcatagctaactgcagcctagaccttctgtgctcaagcaagccttccacttcaacttcccaactagctagagctacaggcatacaccactatgcctggctaattttgtttatttttgtagagatggggtctgctatgttgccctggctggtctggaactgctgggtcaaacagtcctcccgccttggcctttcaaagcactgggattccaggcgtgagccagtgctcttctcctgcagtgactttttttttttttttttagacagattcttgctctgtcacccagacttgagtgcagtggtgcgatcttggttcactgcaacctctgcctttcgggttcaagcgattttcctgcctcagcctcccaagtagctaggattataggtgcctgccaccacgccctgctaattttgtatctttagtagagactgggtatcagcacgttggccaggctggtcttgaactcctgacttgaggtcatctgccagcctcggcctccaaaatgctgggattacaggcgtgagccatcgtgcctggccatgacttttcaacagatttgaagaagtggggtcctgagaaaatcctgggtaacaacagcatcagaggtaacagttttttgtttgtttgtttgtgttttttagatggagtctccctctgtcacccaggcaggctggagtgcagtggctcgatctcagtttaccgcaacctccacccacaggattcaagcgattctcctgcttggcctcccaagtagctgggtctacaggcgtgcatcaccatgccaggctaatttttgtatttttagtagaaacagggtttcaccatgttggccaggctggtctcgaacccctgacctcaggtgatccgcctgcctgggcctcccaaagtgctgggattacaggcctgagccaccccgctcaactgggagcagctttttttttttttttttttgagacggagtctcgctctgttgcccaggctagagtgcagtggcacgatctcggctcactgcaagctctgcctcccgggttcacgccattctcctgcctcagcctcccaagtagctgggactacaggcacctgccaacatgcctggctaattttttgtatttttagtagagagggggtttcactgtattagccaggatggtctcgatgtcctgacctcgtgatccgcccgtctcggcctcccaaagtgctgggattacaggcgtgagccactgcgcccggccttgggagcagctcttaaatggcaaaattcatgtagccaggtgagcctgtgaaagaacagcaggaagccagcctgtctggaatggagtgaaccacaacagggcagatgtcaagggagactgagcaggggccttggggaggagtgtagattaaattccaagggagatgagtgacccttagagggtattaggtgggtaccagcattaatagtggatctgtggattaaatgagcatattagccctgttctgtaggaggaaattggggcatagagtagcaaaactactttcctgaacgcacacaatattaaactgcacccctgggaaccctgccttgctgctaatacctgccttctagcctaactgccaccctcccaccccaggggcagacaggcaacctttccagcctggggtggggcagagctcacagcagggactctgcactctgcacgtagctcaggctctcattcttggttctgctcttaagactgggtccccaccctcttccccataagactacactgggctgggttcctttcagctcgaggaagccgtcttaggaactaggaactgggccctacacaggggcctcagccccgagcttcacataacttatctcctacaaattttaccacgtgcatggtgatctgggtttgcagtcccattttactgctgaagagacccagagacgatcacagctcttaaacggcatttgaacccaggctggctggtgacaaaatgtgggctttgccttgcatggccagatttctggatgtagggcatcctgggatttgcaagggacaaacggcataccctacccctccgaaaccgccttgagcgcaagcaggaaaagagcaggcactaagcatgtgataagaccgccaccgtgtggcgaagatgagcaaccacagggtcagtttcccaagcctgagcctgaagaaggaagggggttgcaggggaggacgaaaggacagagcacaccaacacagactcacacctttccctaatactttattggttacctctaggcctgtgtgcggctgggtgggcttgggggagggcgtcactattcagcttctaggtggaggcatgagaaggccttggcctagccctccagggtcccatactgtggagtttggaggggcaggtctggcctttcctgggtcagcatagggcacccaggtgggggcacaggtggacacccagcacaggcacctaggcaggggcacaagctcactatccgttagccagcctaattgtgtttggagaaatattccttgctgtcatccacgttgggcttaatcgtgtcactgccaggcttccagccagcgggacaaactgtgggaagacacaaggatgcacatgaaggctacagccccaggttcaaggtgaagcaaagcaagggcctgtgttgcagaagaaaatgctggaagcaagtggtccaggcccaggaatgtggatattaagataaaccctccaagcccagttcagtattttttcttttttttttttttcagacagagtcttgctctgttgcccaggctgaagtacagtagcatgatctgagctcatgcaacctctccctcctgggttcaagcgattctcatgccccagactccctagctggaattacagaggtgcaccaccacgcctggctaatttttgtatttttggtagagaccatgttagtcacgcttgtctcgaactcctgacctcaagtcatctgcccgtcttggcctcccaaagtgctgggattacaggtgtgagccaccatgcctagccaagttcagtattttctctttttcttttcttcttttttctttctttctttttttttttttttttttgagacagagtcctcctctgttgcccaggctggagtgcaatggcgtgatctcggctcattgcaacctctgcctcccgcgttcaagtgattctcctgccttagcctcctgagtagctgggactacaagtgcccgccaccacaccctgctaattttttggtacttttagcagagacagggtttcaccatattggtcaggctgatctcgaactcctgacttcaggtgatccacccaccttggcctcccaaaatgctaggattacaggcgtgagccactacacctggccaagttcagtattttctagctggtgtttttcctactcttaattcttcaatttctttttgccacccagctctcctttttcttctttttttcttttctttttttttaagatggagtcttgctctgttgcccaggctggagtgcagtggcacgatctctgctcactgcaagctccgcctcccaggttcacgccattctcctacctcagccgccagagtagctgggactacaggcgcccgccaccacgcccgactaatttttttgtatttttagtagagacagggtttcaccgcgttagctaggatggtctcgatctcctgacctcttgatccgcccgcctcagcctcccaaagtggtgggattacaggcatgagccaccgtgcccggcctcttttttttttttattttttgagacggagtttcgcttcactcgttgcccaggctggagtgcaatggcacgatctcagctcactgcaacctccgcctctcagcttcaaacgattctcttgcctcagcctcccaagtagctgggattacaggcatgcaccaccaggctgggctaattttgtatttttagtagagactgggtttctccatgtcggtcaagcttgtctcgaactcccgacctcaggtgatccacccacctaggcctcccaaaatgctgggattacaggtgtgagccactgcatctggcctctttttttttttttttttttttaaccaataccccatctcttaaaaaaaaaaaaaaagagatggggtattgctatgttgcctaggctcgactcaaattcctgggcctaagcaatcttctgcctcactctccagagtaggtggaactacaggcatgagacacagcatctacaggcatgagacacagcatcttcctgtctttttggctcctttagtcccatctttgtccctctgccccacccctacaggtttttttgttgttgttgtttttgagatggagtctcacactggcgcccaggctggagtgcagtggtgtgatctcggcttactgcaacctcctcccgggttcaagggagtctcctgcctcagcctcccaagtagctgggattacaggcacctgccaccgcacccagctaatttttttgtatttttagcagagacgcggtttcactatgttggccaggctggtctcaaactcctgacctcatgatctgcccgcctcggcctcccaaagtgctgggattacaggcgtgagccaccgcgctcggcctgtttgtttgtttttttgagacagggtcttgctgtgtcacccaggctggagtgcagtggtgcgatcacagcttactgcagccttgacctcccaggctcaagtgatcctccagcctcagcctcttgagtagctgggactataggcatgcttcacaaaccaagctaattttttttttttttgagactgagttttgctctgttgcccaagctggagtacaacggtgcgatctcagctcactgcaacctctgcctcctgggttcaagcgaactcctgcctcagtctctcaagtagctgggattacaagtgtgcaccaccacggccagctaattttttgtgttcttcgtagagacggggtttcaccatgttggtcaggctggtctcgaactcctgacctcaggtgatccacctgccacagcttcccaaagtgctggcaatacaaccgtgagccactgagcccggcccctttgtccaccttggttgaatgtcaggcgttatttgtctcctaccacattagaaacatcctgcagacaaagccctgagctgaatcttctttggggccctaacacccatctggacaggtaagaggacaggcagtgaatgtttgcatgagtgacggaggcgctcagtatgtacccatgtgtcatgtgtgtatctgctcaccttccccatgctcgtctgtgtactggaaggcctggaccagccgcagagcctcatccacggagcgtcccacaggcaaatcattaacagtgatctggcgaaggacacccttgccatcgatgataaagaggcccctgaagacatcagggttcccagtgaggagctgatagctcccactgccagagacaaggaagggactaccaaccacccgctgctagccacagggctgggggcagagaagacattgtacaggagtggtcccagcatcacaggaatggggggcagggcgctccctgagccgggctgagggtcccacagtacctgtaggcaatgccctcatctgttttcagcacgccgtaatcctcagacaagcgtctggtcacgtcagcaagcagggggatgttcagggggcccaagcctccctctttccggggggtgttgatcctgggagtaggggagacagagttggggcctcaggatgcctggcacagcagggtcctcaccctgtgggcccaatgtgataagcactggaggccggagataaggggctttagagtaggccgctgggagcctcacccaccccaccctgggttgggtgcaaggactgtatccccatggctgggaagactgagtttgagaggcacagctccagctaagtggcttcacatgtacttgtaacttgcagcatcacccagcagagagcctgtgttaagagtccccatcctcctctagctgtgtcatggggtacagcccttcacttcggtgaactggagtttccatcttcatgaaatagggcagcacagcctccctcctgggaactaagtacatagagtagatagagttgcatctgagttgcatctgcaactctatataccaggcaactagttgtcaaatgctaattactgtcatcatccttaaagacttgggcggcaatgtttccattattttcacgatggggaaacgcaggttccagaggttgagcaatggccacgaagccacactgctaggacctgagggtgtgagcttagctgcaacctccctctttggcccctgctcataccaagccaggtgggtgaactgagagtccaccgagacgcccagcacttcacagcccagcttgcggaagtcctctgcacggttgctgaacgcgatgatctcggtggggcacacaaaagtgaagtccagagggtagaaaaagaggaccacgtacttccctggggaggagggacacagaggagttagggcccagcttctctcatgcacggccccgcttctacctgggccccctccgggcggcgctcacctttgtagtccgacagcttcacctctttgaaggcgccatcaaccaccgctgtggccttgaagtcaggggctggctttccgatgcgcgcgttaccggaggccatgactgaaagctgagacccccgcccggtcagtgcgcccgggaagacactttgtcctcccaacccaaggtcgcgctgcgtgctgggccctatgactgagtcagcacggcggaggcgacagcactaaccctcaccctcccgggtacccggtctacgaggcccggaggctgccggagacccgctctcctgaccagagcacgagtgacccagccactgccaccagcaccccacgagcgagtcggccggagggcggtgtcgcaagcccccagcccagaaggagacagtgaggcccgcacgagcagggggcgggaagtcgggcgatcaggcctgcgctgcaaggctgtggcctcggtttcccccgcaaggacaaaggaggccactatagcggatggaaagcaaaggcggccagcactaaagtcaggatcgggccaaagcagcctgaagggggtcctcccgccaggtgcactccgggtgttcatacctgcgtgggcaaaggctagacgcacggacgatcacacgcgtggacccgcgttctcagcgccaagtgagccctgggccgcgaagccttttatgcccggcccgaaccaagacgtgcacggcgcgggggagggagcggacgagcggagcggtcgggtccactgcgcccgcaggtgcgggggagcgtgcggccgggtccatgcgcctgcgggcggcggggggagacgcgttgccttcggccgggaccactgcacctgcccgcgtgggtaatgcgcccgccgcagactccgcgcacgactccgcctgggagcgcgttgggggccgttggagtccagcatggcgcggaccccgggggcgctgctgctggcgcctctgctactcctgcagctggcgacccctgccctggtctaccaggactatcagtacttagggcagcagggcgaaggtgacagctgggagcagctgaggctgcagcatctaaagggtaacctcaggcggcggggatgacgatgcccaaaggctccccgttgccctacttctcctgctggctgcaaagggaccttcctcggcgggctgcaaatctccacccagctccgcactggaggcgtccccttgggctggttacttttctctaaggctcggtttactcttggatatattgaaatagatactgctttaaagcagctcccaggggaagagagggtgtgggcaggacactgaagctgtcactcggggataggtgccaggaagggcagagacagagaaagaagggggcgggcaagcttgggaaatcagagagggtccgattgcagaagacccgtgaccagtgcagcgagaacgacaagcgaaagtcccatatggaaagatttggggaaagaatgtccaaggaagagggaatagcaaatgccaaggtgaaaagtcctgaaggagaaatggaaagaggtcggtgaggtgtggcagagacatgggtgtgggagggtaggaggtgtcagaccttggtgagcggtgagttgggataagatcggagttgggataagatctgtctcataggggaaaggggcagattcagtaaagagccctttaaagtgatcacagtggccggcgcggtagctcacgcctataatcctagcactttgggaggctgaggtgggaggatcccttggtctcggagaccagaccagcctggcccacacagcaagactccatctctacaaaaaatattttaaaattagcctgacttgatggcccagcactttgggaggccgaggcgggaggactgcttgagcccaggaattcaagaccagcctgggcaacatggagagaccccctactctacaaaaataaataaataaataaaaataaaaaataaattagcctgccatggtggcatgcgcctgtagtcccagctactcaagaggctgatacaggaggaccatttgtgccaaggagtttgaagctgcagtgagccatgattatgcccttgcattccaacctgggtaacagagcaagatcttgtctcaaaataaataaattaaataaataaacaaactgatcataataaattggtttgtatatgctagcacagcaccgggagatttacttaccttcattatgtcaattatgccatttatcacttgacaaccctgctgtcaggtggcattgtgccttctaggtagggccatggtcacacccctgaagacagaagtcagcttcaaatggcgggcaccaaggatgttgtaggacactcacaactgggcaggctggcacagcctggaagtgtcaggttgtagttcctctggcccacttaccccgtatatgagcttggaaggttggcttgctgtctctgggtcttggtttccccacctgagactcgtggaaatattaaatgaggccaggcatggtggctggctcacacctgtaatcccagcactttgggaggctgagatgggagtatcacttgagcccaggagttccagaccagcctgggcaacatggtgaaacaccgtctctgcaaaaaatacaaaaaattagccaggcacagtggcatgtgcctgtagtcccagctacttggtaggccgaggtaggaggattgcttgagcccaggaggttgaggctgcagtgagctgtgactgcgccactgcactccagcctgggcgacagagcgagaccctgtctcaaaaaaaaaaaaaaaaaaaaaaaaaaagcttaaatgagataatctgtggcagggtgtctggcatagaagcagagtctagcgaatatgtgcttctcttattcgttagtatctttatctttctccctctctgggggaggggattgggagtaggccccctccacgtaggtcttcacctctgccctccttctctagaagtcgaggactcaatccttggcccgtggggaaagtggcggtgtctctgcgacctgggcaagcaggagcgcagccgcgaggtagtgggcacagcgccgggcccggttttcatggacccggagaagctgatccagttacggccctgccggcaacgggattgtccatcctgcaagcccttcgactgcgactggaggctctgagcccgggtgagagagcagggccggggcaagttgcggggcccagggtgggcgcggagggaggatgtgcggtgcggggcgggtatgaagcgagtttgaggaagggagaactggggctccaagtcttgagtgacttgaggctgatttggttagggggaagctgagtcaggagccgtgagccccgctgatatctagggagaaaaggagaaaagtggagggggcgccgggcgccggggctcacgcctgtaattccagcattttgggaggccgaggcaggcggatctcttgagtcctggagttcaagattagtctgggcaatatcgttgagatcacctctccataaaaatttttaaaattaggccgggcgcggtggctcacgcccgcaatcccagcactttgggaggccaaggcaggcggatcacaaggtcaggagatcgagaccatcctggctaaaacggtgaaaccccgtctctactaaaaatataaaaaattagctgggcgcggtggcgggcgcctgtagtcccagctactcgggaggctgaggcaggagaatggcatgaacccgggaggcggagcctgcagtgagccgagatcgcgccactgcactccagcctgggcgacagagcgagactctgtctcaaaaaaaaccaaccaaacaaacaaacaaacaaaaacatttaagttagatgagcgtggcggcacatgcctgtggtcccagctactcggtacgatggggaggaaggatcgcttgagcctgggaggcaaaggttacaataagccgagatcgctacactgctatccagcctgggcaacagagtaacatcctgtctcaaaaaaaaaaaaaaaaaaaaaaaaaaaaaaaaagtggagggggaggcgaagaggagtaaaaggagataaagagacaatgaactaggaccctgaggaaggggcatgagcctggtaaggggcgggaacccacaggcagaggacatgagccccagtgagcccagggaatagaagtggtggatgccaggcactgtggctggctcaggcttgtaatcccaacactttgggaggctgaggcgaccggatcgcttgagcccaggagtttgaagccagcctgggcaacataatgagaccccgtctctacaaaaaataccaaaaatagtcgggcatggtggtgtggtgtgcacctgtagtccagctgcttgggagactgaggtgggaggatcgcgtcagcccaggaggtggaggttgcagtgagccaagatcgcgccactgcactccagcctggacaacagagagagaccctgtctaaaaaaaaaagaaggccgggtgcggtggctcacgcctgcaatcccaacactttgggaggccgaggcgggcggatcacaaggtcaggaaatcgagaccaacctggctaacacggtgaaaccccatctctactaaaaagtacaaaaaattagccgggtgtggtggcgggcgcctgtagtcccagctattcgggagactgaggcaggagaatggcgtgaacccgggacgcggagcttgcagtgagcggagatggcgccattgcactccagcctgggcgacaagagcgagactctgtctcaaaaaaaaaaaaaagaaaaaaaaaaagtgggtcgaggggtgggggtggggacattcattctaagttgggaggaatgagcttctatagggagcagagaccctgagcaggagtccaccgaggtctgtgatctccaacgggggtggggaaggcttggcctgaatgagacagaggttaggaagcacagatcttgcacggagtggaggtgggccgaagggagcaaccaagagagggagtttggggactccaaatccaaaagcctgggtttagtggaagcggggctacctggtccaggggacttagaatgtgtacagaagcagggaccgcaagtacagggcctgaatccaagtggcagttggggacccagtgatgcggtgacccgtgtcctgggagtggggtgatatttgactctctagttccccgttaggctgggtcttcgaagctacgtctcagtttccctcttatttccccctcttcccaccgggccacgcaggcggggccccagagaccgtgaagcagagcttgcaaagtgaccccgtccaccgaattccccaagctgagtgttcggccatagcccttcgggactacaattcccaggagggcgcacggcagcgacgtcggcgtcggctgcgtaagcgtccacggcggcgggagcgccaggggcgtgttctgcccgcggattggccggaagcaggcgccgcttcgaggcccgcggaaaacgcgcgccgagacccgctcctgcagtattagttcttgcagctggtggtggcggctgaggcggcatggatctcagcgagctggagagagacaatacaggccgctgtcgcctgagttcgcctgtgcccgcggtgtgccgcaaggagccttgcgtcctgggcgtcgatgaggcgggcaggggccccgtgctgggtgcgcccctagggccagggaggggaggggcgtggtacggaggatgcgggaaacgggagtcgggattgcactgcaccaagggaggggatgtggtcgtggtgatggcacctaaagaagcagtgatgatagaacagggatgaatggcaactttcacgggctcagtgattggaccccggctgccagaaaactgacaccccttctccccaggccccatggtctacgccatctgttattgtcccctgcctcgcctggcagatctggaggcgctgaaagtggcaggtgagcccgaggtgtgcgtctggggaagggattcctgggtatgtgcaggggcaggtgagaactgaaaggggagggcaggaactgggagaaccagctgttccccttctcttccaaacctcctcccagactcaaagaccctattggagagcgagcgggaaaggctgtttgcgaaaatggaggacacggactttgtcggctgggcgctggatgtgctgtctccaaacctcatctctaccagcatgcttgggcggtgaggggtccccgggaggggcagccagcatgggctgaccaagctttgttcctagaatgagattaactgggctctgttccccaccacagggtcaaatacaacctgaactccctgtcacatgatacagccactgggcttatacagtatgcattggaccagggcgtgaacgtcacccaggtgagttaactgtaagttgtccccatttggtcatctcaggataaaatggggacaaaacaggagttcgagactgcagtgagccatgatcatgccacagcactccatcctgggtgacaaaggaagccccccaactcaaaaatggaggcagggcgcagtggctcacgcctataatcgcagcactttgggaagccgcggcgggtagatcaccggaggtcaagagttcgagaccagcctgaccaacatggtgaaaccccgtctctactaaaaatacaaaaattagctggacgtggtggcaggcgcctgtaatcctagctactcaggaggctgagacaggagaatcgcttgaacccaggaggcagaagttgcagtgagccaagattgtgccattgcactccaacccgggcaacagagcaagaccctgtctcaaaaaaataaaaaataaaaaataaactaaaaatgggagaccaggcgcagtggctcacggctgtaatcccagcgtttcaggaggctgaggcaggcagatcacctgaggtcaggagttgaagaccatcctggccaacatggtgaaacctcatctctactgaaaatacaaaaaattagcccagcatggtggcgggtgcctgtaatcccacctattggtgaggccgaggcagaagaattgctcgaacccgggaggcggaggttgcagtgaggtgagatcgcgccattgcactccagcctgggggacagagcgaaaaataaaaataaaaataaaataaaaaataaatgtgggcaaaaatgtgcagtgtgcagattcagcatcagatacgtctggagtgcctcgggcatattcattgctactgttgatttcgtgctcctgtttctgccctaaatgtgtgccacactgacgaccacagtgtagcccctagtcccgtctccatctaatctctccctcatcctaaaggctcagtctccagaacaaatcctacattgtctacctgtcacctctgtcctagcccaggacaccccccactccctggacacctgctgagtgtcgtctctcgtccctcaccctcctatcccctccaatctgttccccaagcagcaacagaaggtagtctttttgaaatgcacatctcgacatttagttttccgatcacagtggaaattaaatcaggaaaattcacagtcgagtggggcagaattacattaaattaccagagaaaaacataaatcagcattgcctcgaatgctctcaatgaaagaatggaccgttctgagagaataacaaggcaaaataaccttgacgtaggaattgtatgctgggtatggtggctcacgcctgtaatcccagcactttgggaagctgaggtgagcaaattggttgaggctaggagttccagaccagcctgggcaacatagcgagactccatctccacaaaaagaagaagaaagaaaggaattatagcaaggtagaccctgctgaggagggacctgaggaccaggcccaaatgcagagctggcgatacagtaactggtgtagacagacaagggccctacccgtaggcgttcagggcctagcctgggcagaaagatggtcagctggaggttgggcgcagtagctcacgcctgtaatcccagcactttgggaggccgaggcgggcggatcatcaggtcaggagttcgagaccagcctgaccaacatggtgaaaccccatctctactaaaaataaaaaataaaaaaataaaacatgaaagatggtcagctggtaaacaaaaaataaaggttgtttctgaaaacagtagtgctgtggagataccactttcccccagcagctcttggaccctctcttcggtgctgcagccaaaggcccccatgcatgggcccagcatcatgaacctggtcccagctcagggcctttgtactggctgttctcacacctagagccctcttccccagatctctgcacagttcacttcctcacctccttcaagcctttattcaccactacacctagctaactttttattttttgtagaaacagggtctccatatgttgcccaggttggtctcaaccacctgccctcaagcgatcctcccacttcggcttcctaaagtgttgggattacaggcttgtgctaacgcactctaccaatttttttctagtgttttctgccacctcagttcctagaacagtatgtggcatgcagtaggtgctaaataagttagagtaaaagcagcgtgatagagaaagcctcttcaggaggtgagttttttctttattttattgtatttattttatgtttttataaagatggggtctcactgtgttgccaagcctggcctcaaactcccaggatcaagcgatcctcccgcctcagcctcccaaagtgctgggatcacaggcctgaacaactttgcctggtctaggaggagatgttcgagttgaaatccctgattgatccatcctggggacgtgctggagaagaggattctgggtagcaggaagaacgtgccagggctgtgaggctagagcattggtacagttgtttgttcaattaatatgtgtctgttgctgtggcaggtattcgtggacaccgtagggatgccagagacataccaggcgcggctgcagcaaagttttcccgggattgaggtgacggtcaaggccaaagcagatgccctctacccggtggttagtgctgccagcatctgtgccaaggtcagtaccctactagccatggctggcttccaccatcccactatataggggccaggcatggccaccaaagggaaggagggagattccaggtgcctgttttgcccacaggtggcccgggaccaggccgtgaagaaatggcagttcgtggagaaactgcaggacttggatactgattatggctcaggctaccccaatggtgagcagacacgtgaccatggtactaatgttgaaatggccagggctgagcacacttctgaggttttctttttttcctttctgtcatttatcattttattttgcttattttttgtttttatttgttatttttgtttattttttgagacggagtttcgctctttttgcccaggctggagtgtaatggtgcgatctcggctcaccgcaacctccacctcctggcttcaagcgattctcctgcctcagcctcgcgagtagctgggattacaggcatgtgccaccacacccagctaattttgtgtttttagtagagactagttttctccatgttggtcaggctggtcttgaactcctgacctcaggtgatctgcctggctcagcctcccaaagtgctgggattacaggcatgagccaccgtgcccagcctattttttgtttttatagagatggggtcttgtcatgttgcccaggctggtctcaaattcctggagtcaagcagtcctcccaccttggtctttcaaagtgctgggattacagccatgagccaccacccctggccctttttttcttctttttttaaagagatggggtctccctatgttgcccagcctggtcttgaattcctgggcttaagtgatcctcctgccttggactcccaaatagctaggattacaggtgtgaactactgtgcctggctggaggttttctaaattgctctggtcaccctactccacagtgaaagaggccaagtgttagacagtggtgccatttgtttatggccacacagccagtgagtgatagagctgaattccaggccataggattgctgctgtcttccccgcttcccactttgctgtctttctggagccccagtgatggactgagacccaaggtgggcatttgtccctttgttaaggggaaggggaccaggcgtggtggctcatgcctgtaatcccagcactttgggaagctgaggtaggagaaccgcttgagtcctcgagttcaagaccagcctgggcaacatagcgagacccccatctctataaaaaatttaaaaaattagccggttatagtggtgcccacctgtagtcccagctactctggaggaggaggctaaggtgggtgggttgcttgagcccaggagttggaggctgcagtgagctatgattatgccactgcactccagccttggtgacaagatgagatcttgtgtcaaaaaaaaaaataatgttagccaggcgtggtggctcacacctgtaatcccaggactttgggaggctgaggcaggtggatcctttgaggtcaggagttctagaccagcctgaccaacgtggtgaaaccccatctctactaaaaatacaaaattagctggacgtggtggcacacgcccgtaatcccagcaactcgggaggctgaggcaggagaattacttaaacctgggaggtggaggttgcagtgagccgagatcgcataattgcactccagcctgggaaatgagcaaaattccatctcaaaataataataataataataataataatatttaatgacaggctgggccaggtggctcatgcccgtaatcctagcattttaagagacagaggcaggtagatcatgtgaactcaggaattcacaaccagcctgggcaatatgacaagaccccatctctacaaaaaatacaaaaattaggtgtggtggtgcgcacctgtagtcccagctacttgggaggctgaggtgagaggatggcttgagcctgggaggcagaggttgcattgagctgtgataatgtcactgcactccagcctgggtaatagagcgagaccctatctcaaaaaaataaaaaggctgggtgtggtgtttacacctgtaatcccagcactttgggaggctgaggtgggtggatcacctgaggtcaggagtttgagaccagcctgcctgtccaatatggtgaaaccccgtctctactaaaaatacaaaaattagccaggtatggtggtgggtggctgtagtcccagctacttgggaggctgaggcaggagaatcgcttgaacctgggaggcggaggttgcagtgagccgagatcgcaccattgcactacagcctgggtgacagagcaagactccatttcaaaaaataagtaaataaaataaaaatgtttaatgacttgttcttggaggtcaaggagatgtctcagaggcagtctccctgcactgcccttttagcagctcttggccaggtaaaggtcctgtggcaagaaggtgcttcagaccataggaggtgccccaggtactcaggaggaagccttagaagagcggcaaggaggccgggcgtggtggctcatgcctgtaatcccagcactttgggaggccgaggggggtagatcacgaggtcaagcaattgagaccatcctggccaacatggtgaaacctcgtcactactaaaaacacaaaatttagctgggcatggtggcatgcgcctgtagtcccagctacttgggaggctgaggcaggagaatcgcttgaatccgggaggtggaggttgcagtgagctgagatcgcgccactgcactccagcctggctacagagtgggactccatctcaaagaaaaaaaaaagagtggcagggagcttgaatgttatggtgcaacttggactgtcaccattgcccaccctaccccagatcccaagacaaaagcgtggttgaaggagcacgtggagcctgtgttcggcttcccccagtttgtccggttcagctggcgcacggcccagaccatcctggagaaagaggcggaagatgttatatggtgggtgtcatggatgtcctgggggtgctatagggaaggaaggagggaggccagcgttcagccctgcctgagagggttgctccctgtgtaagtggtcactgtcatcacctctctcccacagggaggactcagcatccgagaatcaggagggactcaggaagatcacatcctacttcctcaatgaagggtcccaagcccgtccccgttcttcccaccgatatttcctggaacgcggcctggagtcagcaaccagcctctagcagctgcctctacgcgctctacctgcttccccaacccagacattaaaattgtttaaggagaaccacacgtaggggatgtacttttgggacagaagcaaggtgggagtgtgctctgcagccgggtccagctacttccttttggaaccttaaatagaatgggtgttggttgattaattttatttggtttgatttttttcatttttaaattttatttattttattttattttattttatttttttgagagacgaagtctcactctgtcacccaggctggagtagaatggggcaatctcagctcactgcaacctctgccttccaggttcaagcgattctcctgcctcaatttcccaagcagctgggactataggcgtgtgccatgcccaactaatttttttttttttttgagacacagtctcctgttgcccaggctggagtaccatggcacaatcttggctcactgcaacctccacctccctggttcaagcaattcccctgcctcagcctcctgagtagctgggattacaggtgcacaccaccacacccggctaattttcttttcttttctttctttcttttttttttaatttgagacagagtctcactttgtcaccaggctggagtgcagtgatgcaattttggctcactgcaacctctgcctcctgggttcaagcgattctcctgcctcagcctcccacgtagctgtgactacaggcatgcgccaccacactcagctaatttttgtatttttagtagagacggggtttcaccacgttggccagactggtcttaaactgctgacctcaggcaatctgcccgccttggcctctcaaagtgctgggattacaggtgtgagccactgcgcctggcctaatttttgtattttttagtagagacaaggtttcactatatgttagtcaggctgctctctacctcctgacctcaggtgatctgcccacctcagcctctcaaagtgctgggattacaggcatgagccactgcaccgacctttttagttatatttttaatttttaaaaatttttaaattttctttcttgagatggagtctcgctctgtcacccaggctggagtgcattggctcaatcttagctcactgtaacctctgcctcccaggttcaaatgattctcctgcctcagcctcccgagtagctgggactacaggtgcgtgccaccaggcctggctaattttttgtatttttagtagaaacacggtttcaccgtgttagccatgatggtctcaatcttctgaccttgtgatccgtctgcttcagcctcccaaagtgctgggattacaggcgtgagccgccatgcattgcctatttttatttaaaaaattttttgagacagaatctcactctgtcacccaggctggagtgcagtggtgcgatctcagctcagtgtaacctccgcctcctgggtttaagtgattctcccaccttaacctcctgagtagctgaggttccaggcacacgccacgatgcccaactaatttttgtattttttgtagagatgaggtttcatcatgtcgcccaggctggtcttgtagtcctgggttcaagtgatctgcccgctgtgacctctcaatgtgtgagctaccatacctggctgactaatatgtaaaatacatgatgtggctgggcgcaggggctcatacatgtaatcctagtgctttggaaggctgagtcaggaggatcttgaccagtctggacaacatagggtaacaagagcgaaactctgtctcaaaaaaaaaaaaaaaaaaaaaaaaatgctgggctgcatgggggaagataagaaaaaataaagaaaggtcacgaaccaaacaaaaatcttggcgggcagggtgccgtgtggctgcagtcccagcttttctggaggttgaggtaggctccagcatgggcgacagagcaagaccatgtctcaaaaaaaaaagcatatctgcgcattaatgtttggaacaagctgcattctctccagaaggacctagaaggcacagataagcccaccagtgatttggggcaggttgggatggaagcttctcaaatgttctcccttctttctttggttctgtttttgttggttttattttgttttgttttgagacagagtctcgttctgtcacccaggctggagtgcagtggcacagtcttaagtcactgcaacccccacttcccaggttcaagcaattctcccacctcagcctcccgaacagctgggactacaccatgcccagctagtttttgtatttttaatagtgacagggtttcaccatgttggccaggctggtcttgaacccctgacctcaagtgacccgcctgcctcggtctcccaatgtgctgggattataagtgtaagccactgtgcccagtctgtttttgttttctgagacagggtctccgtcacccagaccgaagtgttgccatgtgatcttggctcattgaagcttcgaatgcctgggctcacagggtcctcccacctcagccctgtgagtaagtggaactacaagtatgccaccacgcacagccaatttaaaaaaaatggctgggcgcggtggctcacgcctgtaatcccagcactttgggaggccgaggtgggtggatcacgaggtcaggagatcgagaccatcctggctaacacggtgaaaccccgtctctactaaaaatacaaaaaaattatctgggcgtggtggtgggcgcctgtagtcccagctactttggatgctgaggcagaagaatggcatgaacccgggaggcagagcttgtagtgagccaagatagcgccactgcactgcagcctgagtgacagtgcgagactgagcctcaaaaaaataaataaataaataaaattaaaaaaaatttggtagagacaggatcgccctgttgcccagattggtctctcaaattcctgagctcaagcgatcctcccatctcaccctcccaaagttcttgggattacaggcgtgggccactgcgcctgccctgctctcttttttgagacagagtcttgctttgttgcccaggctggagtgcagtgttgcaatcttgacttactgtgccctcaaactcctgaggtcaagcaaccctcctgcctcggccttcaagtagctagcactgcaggcgtgtatcactatgctcagctaagttttttatttcatagagatggggccttcctatgtgagaggaggcctagcactttgggagtccaacggtatgttgtgttcttgagatgaggtctcactctgtcacccaggctggagtgcaatggcataatcttggcttactgaagcctccacctcccgggctccagcgattctcctgcctcagcctcccaagtagctgggattacagatgcgcacctccatgcccacctcggcctcccaagtgctgggattacaagcgtgagccacacgcccggcccctatacagttttttttttttttttttcttgagatggatgctcattctgtatcccacgtccgacataggaggctgcggcaggagaatcgcttgaacccggctggtggaggttgcagtgagccgagattgcgccactgtactccagcctgggcgatagtcagagactcagtcacaaaaaaaaaaaaaaaaaaatttgggctgggtatggtggctcacgcctgtaatcccaggactttgggcggctgaggcgggcagaacacctgaggtcaggagtttgagatcagcctggccaacatggcaaaaccccgtctctactaaaaatacaaaaattagctggacatggtggcagatgcctgtaatcccagctactcaggaggctgaggcagaaatgcttgaacctgggaggtggaggttgcagtgagccaagatcgtgccattgcgctccaacctgggcaacagagtgagactccgtctcaaagaaaaaaaattttttttatagagatgggggtcttgctatgttgcccagtttgctctcaaactccgggcccaaaggatcctcccaccatagcctcccaaagtgttaaattgttgagattacaggcatgagacacagtgcccggccaagtgtcctaatttcttattgtcattgaattagagctcacaaatatgacctcattttactttaattacccctttaaacacgctctttccaaacacagtcacgttttgacatgctgggggttaggacttgaacatatgaattggaggagacccattcaacccataacagagcatttctccactccacgcaaattctttgtaggacgcagaagccagcactgcaccagccagccagaatcccagaactgtcctttgacagtggaggctagagtgcccaggaatgcatgatgggggacccagctctgatctgggggtctcagagcctgaggaactgactggcagaggtctgcggggtgaatgcggtggaataagtgactggaggatggagggggttccaggcattgggcacgtgttgaggcctagaaatgggagacctggcttcaagaaggcccgagaggccaggcgccgtggctcacgcctgtaatcccagcgctttgggaggccgaggtgggcagatcacgaggtcaagagatggagactatcctggccaacatggtgaaacctcatctctaccaaaaatacaaaaattagctgggtgtggtggtgggtgcctgtagtcccagctactctggaggctgaggcaggagaatcacttaaacatgggaggcgaaggtttcagtgagccaagatcatgccactgcactccagcctggtgacagagcaagactccgtctcaaaaaaaaaaaaaaaaaaagggcccaagaagagggcagtgagagtaggcattcgggaggaggtgtggtctccacccaagagacaccctctatccaaccctcgtcttgttgttattattttgttatttgacttaaaagcttatttttctttttcttttgagatggagactcactcttgctccggctgtgttgcagtggcatctcggctcactgcaacctccgccacatgggttcaagtgagcacatccggctcattttgtatttcttttttttttttttttttttgagactgagtcttgctctatcgcccaggctagagtgcaatggcccaatctcggctcactgcaaccattggctccctggttcaagcgattctcctgccttagactcctgagtagctgggattacaggcaccgaccaccccgcccagctaattttgtttttctctttttttttgagatggaatcttgctttgtctcccaggctgcagtacagtggtgtgatcttggctcactgcaacctccgcctcccgggttcaagaaattcttctgcctcagcctcccaagtagctgggactacagtcacatgccaccatgcctggctaattttttgtatttttaataaagaaggggtttccccatgttagccaggatggtctcaatctcctgacgtcgtgatctgcccgccttggcctcccaaaatgctgggattacaggcgtgagccactgtgccccgccttctttgactttttgtagacaccagggggtgggtcttgaagtcctgagctcaaggggtctcctgccttggcctccccaagtgctaggattataagtaaaagccaccagccaccatgtgcagcctgcaaatgttacttcttttttttttttttctggaatagagcctcactctgtcacccaggctggagtgcagtggtgcgatctcagctcactgcatcctctgcctcctgggttcaagcaattctcctgcctcagctcccgagtagctgggattataggaacctaccaccacaccctgctaatttttgtatttttagtacagacgaagtttcaccaagttggccaggctggtcttgaactcctgacctcaggttatccacccgcctcagcctcccaaagtgctgggattacaggcatgagccaccgcgcccggcctgcaaatgttacttctaacaacagcctttgaatttgtgagaactcagtgctgggtccccgtcccagcagcgtgaagctcacacgggagttggaaagagtccagggttccacactggcctgctgaagatcccgagtgtcatgtttttgaggttttttttaagaaacagagttggctgggtgcggtggctcacgcctgtaatcccagcactttgggaggccaaggcgggtggatcacctgaggccaggagttctagaccagcctggccaacatggtaaaaccccatctctactaaaaatacaaaaattagccaggcctggtggcaggcacctgtaatcccagctactccaggggttgaggcaggagaattgcctgaacccgggaggtggaggttgtagtgagccgagattgcgcctttgcactccagcctgggggacaagagtgagacttcgtctcaaaaaaaaaaaaaaaaaaaaaaaaaggccgggtggctcacacctgtaatcccagcactttgggaggctaaggtgggcggatcacgaggtcaggagattgagaccatcctggctaacatggtgaaaccccatctctactaaaaacacaaaaaattagccagtgtggtggcgggcacctgtagtcccagctactcgggagactgaggcaggagaatggcgtgaacctgggaggcggagcttgcagtgagccgagaatagcgccactgcactccagcctgggctaaagagcaagactccatctcaaaaaaaaaaaaaaaaaaaaagggtctcagccaggcacagtggctcatgcctataatcccagcactttgggaggctaaggtggcggatcacgaggtcaggagttaaagaccagcctggccaacatagtgaaaccgctgtctctactaaaaaatacaaaaatcagctgggcgtggtggtgagcgcctgtagtcccagatacttggggaggtaaggtgggaggatcacttgagcctgggaggttgaggctgcagtgagccgagattgcaccactgcacttaagagcctgaacaacagagtgagaccctgttttaaaaaaacaaaaacaaggctgggcacggtggctcatgactgttattccagcactttggtaggccaaggcaggtggatcacctgaggtcaggaattcaagaccagcctggccaacatggtgaaaccccgtctctactaaaagtacaaaaattagtcaggcatagtggcaggcacctgtaatcccagctagtaaggaggctgaggcaggagaatagcttgaacctgggaggcagaggttgcagtaagccgagatcgtgccacactgcactccagcctgggtgacaagagcgagactccgtctcaaaaaacaaaaacaaaaaacctatggctttcacatgtttccttttctaaatgaggtcctgagtatgtgggactacaggcacaaaccattgcacctcgctaattttttttggtttttgttttttttggtagagatgaggtcttactatgttgcccaggctgattttgaactcctggcttcaagcagttctcctgcttcagccttccaaagtgctgggatttcaggcgtgagctgtcctacctaattttgtccagcctaacttttttttttttttttattttggagatgaggtctggctatggtgcccatgctattcccaatctcctggcctcaagcaatacagtcacctcagcctcccaagtagctgagactgtagcccgaactgccaaaccttgcatcacaccctcctgtctctctcttttttttttttttctgagacacggtctccatctgttgcctcagctggagggcagatgatggctcactgcaacctccacctcctggctcaagtaatcctcccaccttcagcctcccaagtagctgggactacaggtgtgtgccaccatgcccagctaatttttttaatttttagtagagatggggttttgccctgttgcccaggctggtctggaactcctgacctcaaagaattcatctgcctcggcctcctaaagtgctagaattacaggtgtgagccacagctcctggtacatcacactctatcctcaggttcaagtgtctctgcctggcatccagtgtcttccaggaccagatcccatctcccatggtctatcccaggcttcctggtcagctcagagttcccagaatatgaaatctccaggcctttcacttggaatgtcctccatggcttgattatctgactggagatcctttaaagacttgctttacttccttgaatgcttgttcctcctccttgtcacaataacacagtctataacatcagtaacccagtatgtaacatcatccaccagaagcaatcataatagacggtctacattcattgagtgataattgtgtgccacactttctaagcattttatttgacatcccccccattggaggtggagtctatgatgcctctccttgaatatgagctggcttcagtgactcactgtagtgaataaaaagtgagagatgtcacactgtgtgagttccaaggttaagtcatcagaactgaaacagatcccacctggcttgctctcttgggatatttcccttagaccgtagctgccatgttgagaggaagcccaagccacagagaggccatgtgcagatattctggccaacagccccagcagaagttcaaggcaacagccaacaccaactaccagatatgtgagcaaggaagccttcaacgtgattccagccccagccactgtgtctgcaagtatatgacagatcttcaggaagaactgccaagctgaaccaagtcaaaccccagaaccatgaaagatagtaacttttttttttttttttgagatggagtctcgctctgtcacccaggctggagtgtaatggcgtgatctcggctcactgaaacctctgcttcctgggttcaagcaattatcctgcctcagcctcctgagtagctgggattacaggcatgcgccaccacacccggctaattttctgtatttttagtatagatggagtttcaccatgttggttaggctggtctcgaactcctgacctcgtgatccacctgcctcggcctcctaaagtgctggttgttgtttctttttttttgttttgttttttgagacggagtctggctctgttacccaggttggggcgcagtggcatgatctcggctcactgcaacctctgccttatgggttcaagtgattctccagcctcagcctcctgagtagctgggattacaggcacgcaccaccatgcccagctaattttttatttttagtagagacagggtttcaccatgttggccaggctggtcttgaacccctgacctcaggtgatctgcccgcctcggcctcccaacgtgctgggcttacaggcatgagccactgcactcagccgataatgacttttttttctgagatggagtcttgctttgtcgcccaggctggagtgcagtagtgtgatctcagctgactaaaacctctgcctcccaggttcatgccattctcctgcctcagcctcccaagtagctgggactacgggtgcctgccacaatgcccgactaattttttgtatttttagtagagacggggtttcaccatgtcagccaggatggtctcgatatcctggccttgcgatccgcccgccttggactcccaaagtgctgggcttacaggcatgagccaccacgcccagcctagtgacctttttttcatcactatattggaattgtttggtatgcagtgttagataagcagaaaaacttgcactaactcactgaattctcctttctcaatcctgtgaaaggaatgcatttccgttttattttatttattttattgtaatttttctttttgagacaaggtctcaccctgttacccaggctggagtgcagtggtactgtctcaggtcaccacaacctccacctcctgggttcgagtgattatcctaccgcagcctcccaagaaactgggattataggcatgtgccaccacagctggctaatttttttttttttttttttgagacagatccttgctctgtcacccaggctggaatgcaatggcacgttctctgctcactgcaacctccacctcccaggttcaagcgattcttctgcctcagcctcctgagtagctgggattacaggtgcgccccaccatgcctggctaatttttgtattttttagtagagatggggtttctccatgttggtcatgctggtcttgaactcttgatctcgtgatctgcccgccttggcctcccaaagtgctgggattacaggcatgagccatcgcacccggctgcctggctaatttttgtacttttggtagagacggagtttcgccatgttggccaggctggtctcgaactcctggcctcaagtgaatgaaccacctgcctcggcctcccaaagtgctgggattacaggcatgagacaccgtgcctggcccacattcccattttaaagatgaagaaactgaggctcaatctgggcaacgtgtgaaaccgaagttacagcataagtaagtggtagagctgggttgtgaacacaggtggacgctacacggggtcattcccaccaaattctgtagtctgtacatgtataatatggggtcttgggcaggaatggtgacttgtgtctgtaatcccagcactttgggaggccgaggcaggtggatcacctgaggtttcgccaacatggtgaaaccccatctctactaaaaatacaaaaattatccagatgtggtggtgtgtgcctgcaatcccagctactctggaggctgaggcacgagaagcacttgaacccaggaggctgaggttgcagtaagccaagattgcaccactacaattcagcctgggagacaaagctagactctgtctcaaaaaaacaaacaaacaaacaaaaaaaacgccaggcgtggtggctcacacatgtaatcttagtactttgggaggccaaggtgggtggatcccctgaagtgaagagtttgagaccagcctggccaacatggtgaaaccctatctctactaaaaatacaaaaaattagctgggcttggtggcaggtgcctgtaatcccagctactagggaggctgaggcaggagaatcactggaacccgggaggaggaggttgcagtgagctgagatcctgctattgcactccaacctgggcaacaagaacgaaactcagtctcaaaataaataaataaataaaaagctgggatctggcttttgcccaggctggagtgtagtggcaggattatagcttactgtagcctcaatgttctgggatcgagtgatcttcttacctcagcctctcaagtagttgggagtacagcacatactaccagggccagcttggtattctgtgtctgcatgtcttattattattattttttttgagagagaggctctcactgtgtcacccagactagagtacagtggtgtgatcgtggctcactgcagccctgaactgagctcaagcgatcctcctgcctcagcctgctgagcaggtaggaatacaggcacgggtcactacactgggccaattaaaaatattctttttctttttcttttttcttcctttctctctctctctttttttttttgtggagacaggttctcaccgtattgcgaagcctggtcttgaactcctgggctcaagcaatccaaccacctcagcctctcaaattgctgggattacaggcatgagcctctgcacctggccttgaagtgtgtcttgaggcctatacaagttaggcagcttcttggcagccctggtggcacacagtgggaaggaacccctcctgcccttgtcagcccctgttctgaccccctctccatttccaacaactgggtattcccagttatgttgactgctctagggcacaggctatctatcatttacactctagtatgagtcagtcactacttctagggtctgaggattagacgtgagacatccgttactttctggcaattctccttccgacttatttccccaagaagcagccacactcgtcacgtgctctagctggcgactttattcaaaggggagagggaaaagtgagagagttgggtcatttctgggataacctggagaggggtgggtctctggagctccagggaggagggacagacatctcaaaactattacagaaggccgagaggacgaggggtggggttctgggtgtcctgaggggcggggctgggggaagggtcgctcccccaactcagggccacgcgtccgctaggggccgctgccgcttccactgccactcccgctgcccgcagcgtccaggatggaggtgcgagggctgcgggaacgccgggagggagcttcccggccccgtcgtcctggtctgggacgaggtaccgcggagatggagatgttgaagcagtgacgggctccaggagcagccaccggtagggcgtggcccagagccgagcgacaaaggtccgtcccgtctgcgaaggtctaggaaaaagtggagttaaggccctagtgggcggagtccagagacgtggggggcgtggcctcgggaagggaaaaatgtgtaaattccttagggattggggtcagagccggagcgtgcggcctgggagtctatgtgcggaacgtgagtgggggcaggtccttggggagggtgaatgttcttactgggccctagcgggatgaatcagggttggggcagttggggggcgcgcagagaggtctgtatcaaggctggggttttgtagagagtgactgggcttctgggtcctccagggtaaaatgtggatggacccagagcaggaatggtttcttgggaagggcaaatctggacttcgagagcttttggggtcaaagggcacaacccagtaggaggttgggctagggaagggtgggagcagggacctggggagtaccaatccggtctctggggtctagacacggtaagaaagaacttggtgggggccgggggcggtggctcacacctgtaatcccaacactttgggaggccgaggtgggcggatcacctgaggtcaggagttcgaaaccagcctggccaacatggtgaaacgctgactctactaaaaatacaaaaattagctgggcatggtggcatgcgcctgaaatcccagctattcgggaggttgcggcaggagaatcacttgaaccccggaggcggaggttgcatcgagctgagatcgcgccactgcactccagcctgggtgacaagaatgaaactccgtctcagaaataaataaataaataaataaataacttggtggggaggatctcagtctcttcccttcaccttctgccccacgctcacctgtccataggtaaggcagctgggctcacagccccttttttctgagagtgggagccaagtcgggccgcaggtgatatcatcttcgcagttggcgaacctggagatggcgagtggagaggtgggtaaagcctttgtagttacattccagcgcgattctggctcttctagactgtgttcactatatgcccccacctcggatccaggccccgccttttagaaccactcccctgctaactaaccccatctctccagatttcaccctgccccatattctatcagatctttccatactctgggccacgtcacaactggccttgtccctacagacctcagaccattagttacaggccagtccctcatattttcccactctttcgttttccttttatttatttttgagtcagggtcttgctctgtgactcaagctggagtgcagtggcgtaagcatggcttatggcagctttgacctcccaagctggagcaatccttccacctcagtgtctcaagtacctgggactataggtgcgcaccatcatgtccgattaattttttttttttttttttttgagatggagtcctgctctgttacccaggctggagtgcagtggcccaatctctgcttcctgcaacctctgcctcccaggttcaaacaattctcctgcctcagcctcccgagtagctgggattacaggcgcccaccaccacgcctggctcatttttgtgtttttagtagagacggtgtttcaccacgttggccaagcttgtctcaaactcctgacctcaggggatctgcccaccttggcctcccaaagtgctgggattacaagcatgagccactacgtccggcccatgtctaattaatttttaaattttttgttgagactgggtcttgccatgttccccaggctgatcttgaactcctggcctcaaccaatcctcctgccttgacctctcaaacgactgagattacaggcacccacccttttaccttatcttttcaatcaagaggactcactccttaagaaatctcagggcctggctgggcatggtggctcacccctgtaatcccagcacttcgagaggccaaggcaggcggaccacctaggtcaggagtttgagaccagcttggccaacacggtgaaacaccgtctctactaaaaatacaaaatttagccgggcgtggtggcggaagcatgtaatctcagctactagggatgctgaggcgggagaatcacttgaacccaggaggctgaggttgcagtgagctgagatcgtgtcactgcactccagcctgggcgacaagagcaaaactccatctcaaaaaaaaaaaaaagaaaaaaaggccgggcacggtggctcacgcctgtaatcccagcactttgggaggccgaggcgggcggatcacgaggtcaggagtctgagaccagcctgaccaacatagtgaaacctcgtctctactaaaaatacaaaaattagccgggcatggtggtgtgcgcctgtaaccacagctactcaggagggtgaggcaggagaatcgcttgaacccgggaagtggaggttgcagtgagccgagattgcaccactgcactccagcctaggtgacacagtgagactccatctcaaaaaaaaaaagaaagaaagaaaagaaaagaaatcgcagggctatgaaaagccacattgccatatggcaggtatcttaaaagctgggggcttctcatgcctcgcccctatctacctgggctctaaacattaagctgcatctcttaaaccttggccctgttggaggccactcccctttacacagaaggccaagcaaactgcaggctccgccctcttccccgcccaagtcacaacccacgccccttgcccccgcgtctcctaccaggcctggcagagctcctcgcagagcggctgtgcctggcgtacccccaatagccgcaggcggaagcgactgcgaagggcacgttggaggtgttccaggaaggattcgcatctggacgttgggagagatagggtcggatgggtcaggacccgagggagttcctgggcaatgggcaaagtacgcgagaaaacggtggagggtgctgtactcactcagggctcggcactccacagcgttctggatggtttccagggcccgatgtctctgttgtgtccatctctgagggacaacaaggtcctggcaaaggggaaccctgtgagctagggtcttggatattcaggtaaggtttgggaactgaggcctggggatcccctggacaggggagacaacaattacatcaatcctcacaaacccataacttaagacccttcctttggaatgcaaatgcagcttcaagtagtaataatcatttcttgtttataataatcaacttacttgtcatgtgcctggtagtgacacatatacttaatccttttccttttttttttttctttttttcttttgagacagggcctcactctgtcacccaggctggagtgcagtggcgtgatcttggctcactgcaacctccacctcccaggttcaaacaattctcgtgcctaagcctcccaagtagctgggatttcaggcgcatgccacctcgtccagctaatttttgtattattagtagagacaggggtttcaccatgctggccaggctggtctcaaactcctgacctcaaatgatctgcccactgcagcctcccaaagtgctgggattataggcgtgagccaccgagccctgctcatatgcttatatgcttaatcttaacaacagctctgcgaggtatatttgttatttctctctttttgggggtccatgtgagacccagagaggttaaatgacttcctcaggatcacacagctacaaagtggcagagttgggatttgaacccaggcagtctaattcttatccaccattcttcagcactatccgtgcctcccaccttggtggccatgctaggcccctctcataaggaaattctaacattgtcatggcagggtaggtgtgggtttctgggtgttggtggtgaggcagggtctggggtgctcacctgccaggtgcagcttgcctttgcccagatcagctgccagcccatggtgttgctgggacctggcttggagtgggcggctccctccacaggcttctagcaggatccatgccaaggtcagttgcagcacccacgtcaggccgatgggtcgcatgtggaccctgcagtccatgtccacctgagataagagctggcaggcatagggtggggttcagccatccctttctgtgagcttagggtggcacccacccagtgcatacccaagaagcagtgccaggcagagtagggaaagtgcagctgaggaggaggctggggcagtggccaaggacgttcaaatcccaggagaccatcagggcctgcctccaacctaggagcccccctcccatcagaaccatgtcctctatgtcccttcagtgccaccccaaccaagcttagaccacagtggccctcctcccatccagcaggatctcccacctttttagtcttcaagagaccccttcttttctcagaatgaaggggacctccctaggtcttccaatccccctctcctgttcagtaattcctccctctcttctatgcggcctccctcctccctctctcgctccctgccggcccttctctgggtcaccttctctcggcccacaatcggcttaggggccacccagagctggacctttgggaccaaggctggtgtggcagggctcaggttctgtcactggggcccaaagccccgaggcagggacagctagcggtctgtggagacaagactgtccccttcccgcctccccgcattcagcccctcacctgttggctggattggggtctagaggccgctaagacacctcaggatccagtccaggaaactggctgctgaaaggggcgtggcttaatgcaggggcgggacctcccaccgtcctgcccacactccagctgaccaaaggctggccgacttggggctggtgtgtatatatccttgtgtttgtttttatgttcagcttgtggcttaagctctgtatctatatatgtggggagtgtgtgtgtgtgtgtgtgtgtgtatgtgtgtgaggaaggtgtgtttgtgtggcctatagcctgtgtgtgttcccaggcacctgtgtcttttgtttgtgtggctgtgtgtgtgttgagcatgtatgtgtgtttttgttgtatgaggttatgtttatgtgtgtttcttggtggagtggttgtgtgtgtgtgtgtgtgtgtgtgtgtgtgtgtgtgtgtgtatacgttcagaatctgggggaggattgtgtgtcccaagcaatgtgtttgcagttgaataaaacaggatcttaataaatgtgagaaggggaaatgtagcattgggttagtgtccctgcaaaaatgttggaagtcagtggataaaggtttttgaccatgaaggttgaccatgaatgaacaaagaaatgtcatgtgctgagcaggatgtgtttgtgtgcacacattatgtgtccttctgaagtttctgtgaatgtgtgttgcttgtgaacactcctttaactcatccattcattcaacaaacatttattgagcacctactgtgtgctagattctggggatgcagtagtgaacaagacatgaaaatttcagccaggcatggtggttcacacctgtaatcccagcacattgggaagctgaagtagaaggatcgtttgagcccaggagtttgaaaccaggctggccaacgtggtgaaaccccatctctactaaaaataatcaaaaatagctgggcatggtggcacatgcttgtaatctcagcagttcaggaggctgaggcatgaaaatagtttgaacctgggaagcagaggttgcagtgaatcaagattgttccactgcactccagcctgtgcaacagagtgaaactctgtctcaaaaacaaacaaacaaacaaaaactcaaaataaaagacacaaaaatctcaggtttcatagagctgacattctagggggagaatcagatgagaaaaacatccctgcagagggtatgggtgtgtatgtctatgtgttgtgttgggagaataatttgtctgttttagatgataatttgtgtgcaactggacatcccttggttttggaactatgtgactgtgcttccattggttaagtgtttatatgtgttgtttgtgtgtgtttgcattggatgactgtgtgtatgtctgtgtttcctaagtatgtgtttgtatggctgcagatgtgagtttgtgtgtatctgtatttttggatgtttgcgtgtgtctgcatttgctgagtatgtgtttgtatgtgtgttaatttgcagaatgtgtgggtctgtgtttgtggagtatatgtttgcagagtatgttcgaataaatgtttgtgtgtctgtgtttactgaatatgtgactgtgagtgttcgtgtgcctctcatctcagggcaagagaggcttttgtctctcttttattgctgtattccctcccagatcccaaaacactacgttgcacacagtaggtactcaatatgtggtaagtgaacaaatcagtagataccgtctctgggtccctctgtgtacacccagtgatgtgctggaggcctcagtaagcaagacctgccggacctagctttcccctggtccatcttgaggtggtccaggatgcttgtgggtcagatttgttcagcctctgggctatgcctcacgccagagcctccgcaccctttctccttccctaatctcagcccccgaccctgcgcttggatttcagcaccgcggacaggagcgcgcgagaccagcaccaaggagagctcccgcggtcgccatcgtgagataggtcgccaggggcggagtccgggccatggacggagagatgtgccagcaagggactcagcgagacggcgacacaaatgtgccgacaaacatatacagagacagacagagataacccaggcaaaggcgcggacttgaggcgacaagctcctggtgaatacccggacccagcctcgccgtcgcccccgtcgtccagcaggggtcgctgttacccagcgaccgcgccctccgggaccttggggccagatactggccaccaccccttgggaagcccttctgtcccccagtgccaagactgggagttcggagggctcggacactctcctctccaactttgggaagcatggtgggtttggcctcacctgtgtgaacatggaggagcggcgagggagctgaaaagcgctttaactgcccccctctccaactaccagctaatcgctcctataaatacagacggcctggcctggctccttaatcctgaccgtgagggaggggtcgctagaggggctgcagggttccctgaggaggctctgattgtggggcaggtgggtgggggggcataatatgtatgcacatgtttttctgaggttgcgtctcctgtgaagacgggtctcctcagtgaaaatgtttctctgtaagcatgagatctctcctggggctgtagaggtctcgtgggtggggacagtttcccacagaggatatggcttttaggggtctctgattgggggtatcctttacacgggaattgttactcctgggatctttctcttcggggaatgcctctttcgtggggagggggatggcttttgagaggaaagtcacctctcagggaccatatctattaggaatgattttcagggttgggggagttcttgattggacagggcgtccctgtggaaactatctccccctgggaatgtgtctcaccaagggggtctctgggggatgaatgtagagggaatgtatctcagggagaaggcttcctttggggtgtttcttgactgagggttctacccctgagaatatctctcctctggggtgtctctttttatagtggtctctcggcagcttggctcccatgggggcaccaggaggctccgcccccccgcccgccccttccccccgccagcgcgggcagcggtggctgagcccgggctcgggcgcccagacgcagtgacggcgccgggcccgccccacttcgctccgcccccgcccccgccacccctcccctcagccgccgccgccgccgccgccgcggtccccgcggcttctcactccctccctcctccctcctcccgccgccgctacctccctcctccctccccgggccgaagtcgccgccgctgccgccatggacgattcgggcctcatccgccgccggaggctgcaggtacgcggctgcctgggccccgggtggagaggaaggggtcggcgccctggggcggggctgggcaggaggcgggagaacttgcactagggtcagccgggacgcccccacccataggttcgggacgctaaccgcggggaacgctgtggccgcgcgtcccgccgcgctggggaccccgcccctcaggcgccgcccggcgatccagggagctgccggaggggtgcagcctagcgctccccctcgaggatcgcctgaggggcgcctggcccgccctagggggatggggctggggccgaagtcatcgccctggcgcctcgccaggctaggggtgagggggcgcagagcaaagttattgccctagggctcatgcccctcggggccatcggcgccgctggaggcgtaaacatgtttgtgcggcaacctcgcccctcaccaccccaggagccccctcccgaggcataggacgccctgcgtcccccacgcacctgcctggccatcaggattcttcctactgccctaattggacaggcacctagacagctttctcactcttcattccacctcctccactacaacatccgcccccccaccgcgatcctcaagtccagcccagcttgtgggtgggcgggagcgatttttagctccttgcagccttagaagatgctggtctcgaggctgcgcaggcgcaggagccgtgcgtccactgcacggagtgggacactgaggatcgctgtggagtgtggggaaggcggggacaaactcaggtgtcaggagctcctacctccaaggtggggagggattctgtagccgagaagcgtcctctgctcgtcttcagctgcgtttctgaggggttagtacggaagttcagggttaatacggaggtccggtcccaaacatcccagaggggaaggtgatgatatctgtgccccaaggccctgcctggggtctggcccttctgagcctccttggggctcagccccaggcttggtaatctggagtttagataaagccgagaatgggcccagactcaggctccatccccagcctgaatcttgggaaaagaggattcaaaccctcacctagggcttcgtccatttctagactcccctaatccatcattcccgaggttgaaggccaaggggagctgattggtcagtgcagcaggaaaaatggtgatcagactgcaggaaggaccttccaggcgtctgggtaacgccggagccagacatgagttggaaaactaatttgctttcagagcccagatggcccgatctccggagcctaggcctctctgaagtgctcccacattctctccgcctctcgggggtgggttaggagagtgggttccgagagaagggaggcagctgcggcaaagttagagcaagtactgcagcagccaggttgggtccgcgccgtcgggtttctgagaaaagggaggaaagaggcggggcctgcacggtgtgtccccgccctccaggccggcgtcaactctcattggctcagcgccacgcgggactttaaactcccgctcgagacaccgcccccaacgcggaatgcttccactcacccacccacccactcaaccccaggcttgctctgggtccggcgatccctgtcggagtcctgtccccaccgcttcccttctggcgggattaaccacttcgctgcctggatacacccacatacgttggtgcatcctcttaggaactgtcgcatcactgctgagcgcccgagggtcccctgtgtgcagctaggctcttttttttttttttttttttgaaacggagtctcgctctgttgcccaggctggagtgcagtgacgcaatctcggctcactgcaacctccgcctcccgggtttaagagattcttctgcctcagcctcgctagtagctgggattacaggctcatgccaacatgcccggctagttttgtatttttagtagagagtgggtttcaccatgttggccagcctggtcttgaacttctgacctcaggtgatccacccgcctcggcctcccaaagcgctggaattacaggcgtgagccaccacgccctgggatcttatatgtagacagcatcctgagttcgaatgccctgtctgcagtgtcaactattaatcctgtgcgggagaagcggaatccacttggccgagcggctctgcagctgagattggaggtggcgtctgtttacactgacgccaaagacccgaacttccgccgctccagtttgaccctttcttcgtccctagaatgtttgggggcgctagcgggtggggctgggttccaggtcttcttcgggtggtgcttaaaagccctccaggggcttaccctccaaggccggttacccggatctggacaccctgggctctgtggccagaaaatccaggtcttgatttcgcttgggccattgcagacacgcagccaggtcgactggtcctcattcactccggtcatgcaaagacagagggaaaacctggtttggattatcggtcacccgtggctcgggagggcagggctgccctttggccccgcctatatgtttgtccgttgtacaacggggtgggaggacgctgtggcccatcctctgtcatgcagcatgtccctccttaataacgcctgttctccagacttagtatttattgagcacttgctatgtgctaggcaccatgctaaggggctaggcatctgcatcaactcctaagatcctcaaggagacacgggactattggaaggtcatttgccaaggtcataaaaagcagaattgagatttgaacctaggctttttgcttttagagatcctagaaatgtctaggacatccctcattttccttttgttggagtcccctccaaaggccttttgaaactctcccccaaatctttccacctgcagccccactcagtttccttccttccacctcaccctgtggatagaaaactggctggcaggtgttgccccttgtaccccattcctttcctcagaaaaaagccaagaccccatatctcctgatccctacagtgacttcctaagagcttgacaaatggaaggtgaccttcttcaaatgcagacacataaagttaatactcactaattattattattgtcattataaaaaatgactatgcggccatcacctgaatttccatttttatttttttattttttaaactttttattatttatttatttattgttaattgagagggtgtcttactccagcagtggtgcaatcatagttcactataacctcgacctcctgagctcaagagattctcccacctcagcctccgtggttcccattttaaatctcagttgtgagtcactctacttacctaccccccaccccctaccccaactctatgactctagctgggagtcagatagatctgctgaggtgtagatgagtcattcattctttcaacctttcattcattcaacctttcattcattcattgagtacgctaagcttattcccgcctccaggcctttgcccttgcagttccctccacctggaatgctctctccacagatcctcccatggctggctcttatctttcagcaaccagcttaaaagtcacctccacagagcagccctgtctgacaatgtgtctccatcctagccattgtccatcacatcaccctgtttaatttattcataagactaattattgtctaaaatgatttcgttcacttctacactaatcttgtttaatgtcccctttaccctataaatactagtcccaaaaggccagaaacttttttttttttctccttgagacagagagtcttgctgtgttgcccacgctggtgtttccttggactcaagcgattctcctgcctcaacctcccaagtagctgggactagaggtgcacaccaccacaccggacttgtaatttattcactactgtgtccctagtgcctaggattgggtcagcatacagtaggtgctcaagacatatttttcaaataatgattcctatttcatttgcacaaacacacgctgatatgccaactcacttgcctttatatggcgccccgcctgtgtacgtgggcctctgttggtctctgagggtcaggagaggaatcacccagggatcctctcccccaagaaacttggcccgcagtgcatggccaagggtgaaagtgacagtgctgaagaggggcctgtcttaccctgcttctgctcctccagggagttgataatgcttgtgggcagcaacggcaggtccacgctgaccttcatcgttttgcccctttgccttccagaaggatttgcccctgccccggaaaagcagcaggtgagcctggggagagacgtggcgggggctggccgccccttctcccgccggggtgggggcgccaggcgagtgcgcgggcggggcctggctcgccggcacgcagcagcgccccctcccggccggctgcagccgcagggccctccccttccctgccctcccctgcccgctgcggcggctgcagcctccgccccgcgcgcttgctccccgcgccgccgccgccgccgcctccgccgctgctgccgcacctgccaccatgtcgccgccgccgggtcatgtctgactctctctggaccgcgctttctaatttctcgatgccctccttccccggcggcagtatgttccgccgcaccaagaggtagacccccgatcccctagacattgtcccggccctccccgcaaaagccgccgctccgggtactgctgcagggcggggcccgggatgctgcgcccggtccagctgcgccagaggtgccccagctgcgccttcccgccggggttggggttgaatggggggtggtgtgggccgagtctggggggcttgcacgctggagaggacggccgcggggggagggggctgcgccactgggggtttgtggcgcctttgtctgctggcgctgcgggctccaacagcctggtgggggtagaggaagaaggggaggctggggggcttggcaccctcagaacaatagccgcagcctggcctccccccacccccatgccgcgtgctcctggacgcgctaatatgctcagtcactgcggctgtgggtgaggggacggacggaggggcttggggctccctcttcgggagctggatgctgaggggtagaaaaaagggggggtttatcataacacaacccccccccccgaacacagccttacactgaaaatagtgacacacagcgtcacacaggacatgatgtcacacacatacacacaacagccctagtggcccagatacactgggaggtgccacacatacctagccttgcagctgccacaggtcagaaccatgcacagacacacaggggcaccacgtcgtgtacacctagtaagatgtcacttacatggcgatccacacacacacagttatgtcatccaagatgcaaacatgtgtttcaatatcccatccatgcatccaagaatgtcacaacacacgatgtcatatctaggtatctcacatactatgtcacactgacatcaggataaacagatgtagggatcttgcagagacagaaccacgcaaaatcacatgttatcacattgcaagactcacctagagaatgtcaaatgtggtgacatgtttggacacagtgtcacaagatgttaaattcacacaatagatgctacatacacatggacaagcatggtgaatgtcacacccagacggaaggacagtatcggacacagactcagaatgccacacaaagacatagatacatgtaggggggatcatgcatcctggccaggcatggtggcaggcacctgtagtcccagctactcaggagggtgaggtgaggcgggaggattgcttgagcccaggagtttgaggctgcagtgagccactgcacactgcactccagccgggcgacagagcgagacattgatttaaaagaaaaaaaataataataatacaacctgcctgtgttacagcacacattgttatggacaagtggcatttcacactgtgtcacatagacacacaaatgctcaaattgtatcacacaagataaacccacgttgtgtcacacgtatcacactagaatgcattcagcgtcacacattgttgaattcatacagtggataccacacgtggatacctacagtgaatgtcacgcatagactgagacacgctcagtatcaccaatggtgtcacctagacacagtgactatcacaccatgacagacactgccctacacataatccatactgagagtttctcacacacatgtcatatgcacatcccctgccgtacacagtcctgccgaggcctgcaccacctttcttcgagaaaccctcccagggagcctccaaacacacatggatgggagataggcggggatctgagacaggaggtcagctggtggggctcaagaactcactgggctgcggcccggcccggcccccctgccttaccttccccgcagctgccgcaccagtaatcggaaaagcctcatcctgaccagcacttcacccacgctaccgagaccccactccccgctgccaggtcacctaggtgaggccagtggtagagacttggtgggtgcagactggcctacagtaggcggggcctcaggcgaggaagcgtggtcatgctacagaaggggcgcagtttgaatggaggcgaaccagtttggataaggggcggggccatgcttgtgtgggtgtggtcagtcgcagagggacggtcattggggggcggagactcaggtgggcggagactcaggtgggacggacagaaaggaggagtcgtacctgaggggcggggccatcccagatgaagccagaatcgtcttggaaggggccaggctgactcggcaacgaaaaaatttagagaggcggggccacaggcgaaggggcgtggtctccccataataggcgggactagactaaagacaggacatgctgctgtttgcacgccgctttagggaacgagagacctgacaggatttgccccctctttctctcataggcagcagtcccctggacagcccccgaaacttctcccccaacacccccgcccacttctcgtttgcctcctcccgaaggtgagtccctcccctccagggccccagaaccctgggcagaccctccccaaccactgtctgggccgccatctgttctcctcctaattgcacccgagctggggcctgaggggaccagcgagtgccccaaggtctcagcgggaaggagcgcctagccttcggggcggggcctataagaaggcggggtccaatcgccgatctggaacggggaaggcggtggggctccctttgcggcaggtcgaaagcgcgtgcgccctgggcgcggggtcttagtctctccgagccttgctctcctggccaggtgtttccatagcaacaggacggggcagccaagatgacgtgcgcaagcgcagattgcgcgatgcctatcgagggactcttggtccccgaggtgggggaggacgactagggctgtttctcaaggggaggaatctcaggtttctttccaagggtctcttagggtttctggggtgtccttaaatgaattttctatgggcctttggtgaaactgggggaggcagagaggtttctctgatgttttctggagaaacgtttctgggagtttgggcctgtctctttttctttgaactctattcattctaaaaatggtgtctaaacacctgctatgttcttaggagctgggcgtatggggtcaatgacgtcctgtctctaccctctgagtcgaatagggcaggcaggccagagaatggggatcagtgcaaaggctgatgaaggctgtgttgtgagagtcaaaggagactgtgaagacagacagctcccttgggaaagtgggggaaccgcctattgaccatggaatttagctgagggcaatagagagccaggacaaggctctgggatagggtctcacatgtttatccgcaagcggggaggactgagcgaggggactgctgggaggaagaaggaagggaggagtccaataaatggggtgtgtgtgtgtccttgtaactgtgcaaagtgtgctggtgtgtgtgtgtgattgtcactgtgtgagggattacgtgcctatgcaatggcacgagtctgcgaatgtgaacgtgtgaacatgtgtctgtaggattgtaagtgtctgtgaatatgtgagaggagcaagtcaggtatgtctccaggtgagcgtgcaatctgtgtgtgggtgtaagcgtgtgtgagtgtgtggctgtgagatagtaaacacagagtcacagtgtttactgtctctctctctctctctcttttttttttcttttcttgagacagagtctcgctctgttgcccaggctggagtgcaatggcgggatctcggctcactgcaatttccgccttctgggttcaagcgattctcctgcctcagcttcccaagtagctgggattacaggcgcctgccaccacgcccggctaatttttgtatttttagtagagatggggtttcaccaggttggtcatgctggtctcgaacttctgacctcaggtgatccacccgcctcggcctcccaaaatgctaggattacaggcatgagccaccgcgcccgtccagtttactgtctcacagccacacgcttacacatgcacatgctaatgtgtgttgtgcactcacatgagcacgcgccgatgtgtgtccctgtgtgtgtgcatctgcgtgcgagtgtgaatgagtgtgtcgctgtgtgcaagtttcaatgtgtggtagtgagcgtgggtgtctggaacgtgcatctgtgtgaatgtggaagtgtggagtatgtttgggtgagtctgtgtgtccgagtgtgagtactgagtggaagcacatgtgtctataggtgagtgcatgtctggtcttgcacgcgtgattgtgcattagtgtgtgagagtgtgatatttgggtccatggatgggatagtcaatacgtgtgggtgtctgtgttgaggagtcatgtgtgagtgtgtgtcttcgtgtgtgtgaagtgtaaatgtgtgcactgccagtatgtgagcctgacctgatagtcacaccaacattaatggatttggctgcaacagtgactgtgtctgtgtgcacgagagcataaggacacaatattctatgtcagaacatgttggggggtgggacgggtcttttttctctgagaagatccaagggtctccctcagagctttctcatggagagtgttcacttgggggaaatttctagaatctctctggaaaggcttcactgggtgggggcttttccagttctcggtgtccactctgaatgataagagaggggaccgtggggaggagagtggagacggatcctccctccaattcccggtgcctgcctggaagagtccctctttatccccttgattctgagggccttgaggaatcttagagtgcagatatattcccccaacccccaccctggccctggccagtggcttcacccacaccctgaggagttgggggaccgctggggccttgtggcctctgagcaccttggctgggttccagggcggacggacgccggtggtctctggcctcgctcccttcatctggctatggcaccaacacgcccagttccaccgtctcggtgagtgtggaaagtaggtgggtgggccggtgggtaaggaattcaggggccctccagcctgaagacccacacccaggccagcagtccaggctgggcttgatgacagtttagggccaggctcagtgactcaagcctgtaatcccagtactttgggaggccaagacagaaggattgcttgagcctaggagttcaagaccagtctgggcaacatagggagacccttgtccctacaaaaaattaaaaattatctgggcgtggtggtgcacacctgtggtccccactatttgggaggctgagacgggaggatcgctggagtctgggaggtataggctacagttgagctgagatcgcactgcagcattccagtctggatgacagagtgagaccctgtctcaaaagaaaaaagcaaaaaaagacagtttgggtttccccattcttcaaaggtgttcacttgtccatctattaaagagttatgggtccgccccactcagagcccaatgctctgccctcaacacatttctgggagggtccttcctactcatttctgactcactcatttacagctggtgacataaggctctgtgagttaagccatttactctgatatcagcagctgggctgggccaggccacagctttcacccagagcccacttgctcaccccttggaacacccaaagtcccttcatctgctcccttttctatccatgcccatagttcccttatccagccattggcatgatgttcagcagacatttgtcatgagattgtcatgtggtaggcgggttctgcaagctgggccagagtgtaaatattcacgcagccctcatgggggaagacaagccagtaagaaggcattcacaaaatagaatggtcagaactttgatgcaagtagcacaaggtgaggtgataggggagaggcatgtgactcagattggggggttgtcaaggaaggcttcctggaggaggtgacattgaaaccaagacaacagaccagcaggagtttggcagatggaagagaagggagaagagtgttccaggaaggggaagagcatgtgcaaacctctagaggccacagaacttgcagcatttgaaaagttgaaagtagctttgtggggctgaaaatttgggatgcgggggaggaatagagatgatgcaggcagtgaccttgatcaggctggaaccttgtcagccagggcagcaagggagattttattctaaatccagtggggaagccatggaatggttttatttctttatattaaattgtactaaaatttcagtttgaaccatttgaaattgtgattatgtaggctatagataatgcacactaattaaaaaaataaaagagatggatggggtggggaattttaaccagaggagtgagcaatgtgatgtttaaaaatatcattctggccgggcgcggtggctcatgcctataatcctagcattttgggaggctgaagcgggtggatcatttgaggtcaggagttcgagaccagcctggccaacatggtgaaaccctgtctctagtaaaaatacaaaaatgagccaggcgtggtcatggatgcctgtaatcccagctactcaggaggctgaggcagggagaattgcttgaacctgagaactggaggttgcagtgagccaagactgcaccactgcactccagcctgggtgaaagctatatgaccaggcatggtggctcacacctgtattcccaacactacgggaggttgaggtgggaggattgcttgagcccaggagtttgagaccaacctgagcaacgtgatgaaaccctgtttctacaaaaaaaaaaaaaaaaaaaaaaattagccaggtgtgatggcttgtgcctgaagtcccagctactcaggaggctgagatggaaagattgctcgagcccaggaggtgggggttgcagtgagtggaggtcgagccactgcactccagcctgggggagagagaaacaccctgtctcgaaataaaaaaaaataaaataaagcaagaggagagccaggcatagtggctcatgcctgtgacccagcaatttttttttttttttttttttgagatggagtctcactctgtcgcccaggcctggagtgcaatggcaccgtgccggctcactgcaacctccatctcctgggttcaagcaattctcctgcctcagcctcccgagtagctgggattacaggtgcccaccaccatgcctggctaatttttttatatttttagtagagacggggtttcaccctgttggccaggctggtctagaactcctgacctcagtttttctgcccgcctcagcctcccaaagtgctgggattacaggcgtgagccaccgagccctgccctcagtcccagaactttgagaggccaaagtgggagtattgcttgaagccaggagttggaagccagcctgggcaacatagagagaccctgtctctgcaaaaaagaattagccaagcatggtgtagtcccagctacacagaaggcagaggggggaagattactttagcccaggagttcaaggcttccgtgagccatgattgtactacatccctctagcctgggtgacacaaggagaccgtgtctctctctctttttaactttaaataattttaataaatagagacacagtttcactatgttgcccaggctggtctcaaactcctgggctcaaatgatcctcccgccttcgcctcccaaagtgctgagattacaggtgtgagtcaccatattcagtggagacccttctctaaaataataatgataataaagcaagaggaaacaagatagagtagggatagggaataatgggtgtgtattcagaggaggtcttcccgaggggtgacattgaagcaaaaatttgaaggatgagaaggagggatccatagtagatgtgttccaagcagaaagaatagctaatgcaaaggccctgaggaaggagcttgcctggcttgtccaaggaccatcaaggaggccactaggctgggtgcggtggcttgtgcctgtaatctcagcactttgggaggcagaggcaggtggatcacctgatgtcaggagttcaagaccagcctggccaacatggtaaaacactgtctctactaaaaatacaaaaaattagccaggcgtggtgacaggcacctgtaatcccagctacttaggaggctgagtcaggagaatcgcttgaacgcgggaggcggaggttgcagtgagctgagatcacactccaaactaggcaacaagaacgaaactccatctcaaaaaaaaaaaaaaaaaaaaaaaagaaggccactgtagctggagcagaggaagtaagcaggagagtgagaaaaatccacggcagggacccagggcaggatgaggcaggaccttgtataactggggaaggacttgggtgttcaccctgagtaaggtgggagccaccaagggttctgaacagaggaggctcatgacttgacccaagctttaacagactcactgtctccacccctgtctgtccctgtccacctgtctgtggccaagagtcccagccaagatcctaggatccaaggatcgtaaatcaggtcctgatcctggccttgcccagtgaccccatcggctttgggagtcccagctcagggtcctgagctgttggggggcccatggtggctctgaccccggccctgcccctgtccccagtcctcctgctcctcccaggagcgccttcaccagctgccctaccagcccacggtggacgagctccacttcctctccaaacacttcgggagcaccgagagcatcacagacgaggatggtggccgtcgctccccagccgtgcggccccgctcacggagcctcaggtgggcaggcatccctcctccttcgtaccaagctagtggtcttaggacttgtgcttagagagacccctgtccccgcgaataaaagggttacatcttggggcgggggctctctgcgggcttggaggcagaggactcgacaaaatgggcttctctccccgcagccccgggcgctccccctcctcctacgacaacgagatcgtgatgatgaatcacgtctacaaggagaggttcccgaaggtgaggtgggacccgaggcggtcacggggtgaccaggcggcctgcactctcgctcgccttatccccgcgcgccccctggcggcctcggtgcgcagcgcaggctcctggcggccgcagccttcgggcacagccccgcgcccctcctccgtccctcccgcaggccactgcgcagatggaggagaagctgcgcgactttacccgcgcctacgaacccgacagcgttctgcctctggccgatggcgtgctcagcttcatccaccaccagatcatcgagctggcccgggactgcctgaccaagtcccgtgacggcctcatcaccacggtctacttctatgaattgcaggagaacctggagaagctccttcaagacgtgagtgcacgcggaggccgggctgatctcaggctcagcaccgccagattgtgcccaatgcacccctttcttcaccccacatacattcagggagctcctaccacgttccaggcactggcgtggagctgaggactcaggggtggaagtggtcccttccctaggtctgaccgactgaagaggcaggaatttcacctcgctcatttcccttaggtctttactcaaatgtcaccttttcaggtggcttcttaggcggtccccagtcatttaaaatattaaactcggccgggctcggtggctcaggcctgtaatcccagcactttgggaggccgaggggggcggatcacgaggtcaagagatcgagaccatcctggctaacacggtgacaccccgtctctactaaaaacacacacacacacaaaattagccgggcgtggtggcggacgcctgtagtcccagctactcgggaggctgaggcaggagaatggcgtaaacccgggaggcggagcttgcagtgagccgagattgcgccgctgtactccagcctgggcgacagagcgagactccgtctcaaaaaataataatagtaaataaaataaaataaaataaaatattaaacttagccgggtgcggtggctcaggcctgtaatcccagcactctgggaggctgaggcaagtggatcacctgaggtcaggagttcgagaccagcctggccaacatggcgaaaccccgtctctactaaaaatacaaaaattagctgggcgtggtggtgggcgcctgtaatcccaactacttgggaggcagaggcgggagaatcgcttgaacctgggagtcggaggttgcggtgagccgagatcacaccattgcactccagtctgagcaacaagagtgaaactctgtctcaaaaataaataaataaatgaaataaaataaaatattaaactctactcacatttatcacccactttctcctcagtttctccttgacactcagcaccatccatcatactgtgtatttttgcttattttatttcatgtctatccttctccaatgtcagccccatagttggtgagggtgggggggtggagttgtctgttctgtccactgctgtgtccctgctgtttggaacaatacccagcacacagtaggtactcaataaatgttgggtaaattgatgcttgaatgtccctttgcagtggcatgcacctgtagtcccagctagctacttaggaggctgagatgggaggattgcttgaggtcaggagcttgagaccagcttgggcaacatagcaggaccccatctctaaaacaatttaaaaaatttaagccaggcgaggttgctcacgcctttaatcccagcactttgggaggctgaggcgagcagatcacgaggtcaggagtttgaaaccagcctggccaataaggtgaaactctgtctttactaaaaatacaaaaaagttagccgggcttggtggcacgtgcctgtaatcccagctactcaggaggctgaagcaggagaatcgcttgaatccgggaggcagtggttgcagtgagccgaggttgcgccactgcactccagcctgggcaacagagtgagattctgtctcaaaaaaaataaaaataaaaataaaaataattagctaggtgtagtggcacacacctgctgtcccagctacttgagaggctgaggcaggaggatcacttgatcattcattaattccaccaatatttatttatttatttattttattttttttggagacagagtctcactctatcccactgggctggagtgcagtggtgcgattttggctcactgcaacctccacctctcaggttcaagccattctcctgcctcagcctcccgagtagctgggatcacaggcacccaccaccatgcctggctaatttttgtatttttagtcgaggcagggtttcaccatgttggccaggctggtctctaactcctgaccttaggtgatccacctgcctctgcctcccaaagtgctgggattacaggtgtgagccaccatgcctggcccccaccaatatttattaagcacctactatgggcctggcactagcctaaaagctgggaaatcaactggaaataaaacaaaaattcttgtctttggagagctgacattctattaatagcaggaagagacagaagataaacaataggcgttagaagctaacccctgtaatcccagcactttggggagctgagacaggaggctttctggagcccaggagttgcagaccagcctgggtaacatagcgagaccctgtctctacagtaaaacaagtcaaacaaacaaagacccaataggtattagggctgagaccaggaccagggtaaagcaagtaattatttcttcccccagaacattaaattaatttttgaaaaacttgaaaagtagataaatgaaaacccaacattattttaagtttacatattttatttataaccaagccagaatgtgttataattttactgtcctggttttaatgaaagcaaactcatcaataatactattttcattgaaaccattagacattttcaaagacacattaaaacacatataggttggtgcatacttttttttggctcaagttacaatatggctaggcacagcctgttggattctgtctttatttaattttctttttctttttctttttcatttgagatggaggactctctatgttgcccagggtggtcttgaactcctgggctcaagcaatcctcctgcctcagcctcctgagtagctgggattataggcatgtaccaccacatctggcttaaattttgatattttggcttatgatagatttttggcattaattttaggcttttcaagtattgcaataagatattagttttttcttttctttttttttttttttgagacagtctcactctgctacccaggctggagtgtagtgatgtgatctcggctcactgcaacctccacctccctggttcaagcgattctcttgcctcagcctcccaagtagctggcattacaagtgtgtggcactatacccagctaatttttgtacttccagtagagatggggttttgccatgttgggcaggctggtctcaaacccctgacctcaagtaattcaccctcctctgcctcccaaaatgctgggattacaggcgtgagccactgtgcccggcctctttttcttttctttttttctttttttttttttgagacagggtctctctctctgtcacccaggcaggagtgcagtggtataatcagctcactgcagccttagccccctgggctcaagtaattctcccacttcagcctcccaggtagctaggactacaggcacacactaccacacctggctaattttattatttgtagagacagggtctcgctatggttttgttgtttgtttgtttgtttgtcattgcttttgttttgagacagagtctcgctgtgtcacccaggctggagtgcagtggtgtgatcttggctcactgcaacttctgcctcccaggttcaagggattctcctgcttcagcctcccaagtagctgggattacaggcacctgccaccacgcctggctcattttgcgtttttagtggagatggggtttcaccatgttggccaggctggtttcaaacttttgacctcaagtgatccacccacctcagcctcccaaagtgctgggattacaggcatgagccaccgtgcccagcctcattatttttactgtgtggcttgggcttcagtctcctcacctgtaagatgggacagtagcagcagtatgtactctgaggggctgagagaggggccgggctgaggcagagtgcctatgagccctgtccctctgtgtcccctgccacaggcctatgaacgctctgagagcttggaggtggccttcgttactcagctggtgaagaagttgcttattatcatctcacgccctgcgaggctgctggagtgcctggtgagggggctgggcatgggtaggggtgggttggtagaccctgggagcctgtggtgagcccactcctgccctgcctcaggaattcaaccccgaggagttctaccacctgctggaggcggccgaaggacacgccaaggagggccaccttgtgaagacggacatcccccgctacatcatccgccagctgggcctcacccgtgacccctttccaggtgccggctggtgggcgcagggggactgggggtgagcaggcccagaacccagctcgtgctcactctcagtccctccctagatgtggtgcatctggaggaacaggacagtggtggttccaacacccctgagcaagacgatctctctgaggtaaggctgggtggctaagcggtcagtaccctggttcctgggagggcagggtggggctcatctccggcttctttgccctcaggctttgtggatctcttggtcctacactctgagcctcagttttcccatccataaaatgggattaataatagctcttccagagcctggcatgctggctcatgcctgtaatcccagcactttgggaggccaaggtgggcagatcacctgaggtcgggagttcgagaccagcctaaccaacatggagaaaccccgtttctacttaaaaaaaaaaaaaatgcaaaaattagccaagcctggtggcacatgcctctaatcccagctacttgtgaggctgaggcagaagaatcacttgaatccaggaggcagagattgctgtgaactgagattacaccactgcactccagcctgggcaacaagagcgaaactgtctcaaaaaataaaataaaataaaataaaataattgctcttcccctgtgacctctttgtcatgttaaaatccatgaaacataaaatttaatttacttttttaaccattttattttatttttatttatttatttatttattttttgagatggagttttgctcttgttgcccaggctggagtgcaatggcactatctcagctcaccacaacctccatctcctgggttcaagcaattctcctgcctcagcctcccgagtagctgggattacaggcatgtaacaccacacccggctaattttgtatttttagtagagactaaaatttctccatgttggtcaggctggttgcaaactcccaatctcagttgatctgcccatctcggcctcccaaagtgctgggattacaggcatgagccaccgcgcccggcctttttaaccattttaaaatgaacaattcggggccgggtgcagtggcttaggcctgtaatcccagcactttgggaggccaaggcaggaggattgtttgtgctaaggcatttgagaccagcctgggcagcataaaaaatcagctgggcgtggtggtgcacccctgtagtcccagctactcgggaggctgaggtgggaggatcctatgagcccaggaagtcaaggcttcagtaagccatgatcacaccactgcactccagcctgggcaacagggtgagaccctgtcttgaaaaatgaaattaaaaataataaagaataggccaggtgcaatggcttatgcatgtaatcctagtactttgggaggccaagatgggtggatcacttgaggtcaggaattcgaaaccagcctggccaacatggtgaaaccccatttccactaaaaatacaaaaaaattagttgggcgtggtggcacatgcctgtaatcccagctacttggaaggctgaggcaggagaattgcttgaacccgggaggtggaggttggtgtgagccaagatcccaccactgcactccagcctgggcaacagagcgagactctgtctcaaaataataataataataataataataataataataataatgattaatagtaataaataaacaattctgcagcatttagtaattcaccatgctgtacagccattagatctatgtagttgcagaacttttttatcacccccaaagggaaacctcacacccattacacactccctcctcattcctccctccctgcagtccctggcaaccactaatctattttctctctctgtggaattgctttttctggatatttctttttttttttttttttgagacagaatttcactcttgttgcccaggctggagtgcaatggcgtgatctcggctcactgcaacctccgcctcccaggttcaagcaattctcctccctcagcctcctgagtagctgggattataggcatgcgccaccacacctggctaattttgtatttttagtaaagacagggtttcaccatgttggtcaggctggtctcgaactcctgacctcaggtgatctgcctgccttggcctcccaaagtgctgcgattacaggcgtgagccacatgcctggcctttttctggatatttcctataaatgggatcgtatgctctgtggcctcttatgactggcttatttcacttaacataacgtttctgaggtttatccatgttgtagcttgtgtcactgcttcattcatttttatagccgagtaatattccattgaatggtagatgcattcatccactggtgaacattgggttgtccatctttcatctgttgtaaatagtgctcttatgaatgtgggtgtacaaatatttggctggacaactgctttgagttatttaggatatacgtctagaggtggaatttcttggtcatatggtagctctatgtttaacttatagaggaatcctgcatgggctttcgagcaagctaactggctgtatgtgttaatggcagctcagcatggggaaaattgccaattctattcccaggccagccacactttggcagatgttccagatgtctagtggagagtcctaccccaatggccacacatgtgttttctctgaactgcctagtatttttcaaaaatttgggctgggcctgatggctcacggctgtaatcccagcactttgagagactgcggcgggtggatcacttgaggtcaggaagtcgagaccagcctggccaacatggtgaaaccctgtctctactaaaaaaatacataaaattagccaggtgtggtggtgcccacccgtaatcccagctacttgggaggctgaggcaggagaactgctggaaccagggagacaaagattgcagtgagccgatatcaaaccactgcactccagcctgggtgagagagtgagactccatcttgaaaaaaataaaaatagataaataaaagaagcaaaatataaaaattgaaagatttttgcttcaaaatctgggtttgggccttctcttgaaaaatcagaagttctagggctgggtgtagtggctcatgcctgtagtcccagcactttgggaagccaaggtggcaggattgcttgagcccaggagtttgaaaccagtctggacaacatagcaagaccctgtctctacttaaaaaaaaatagaagaagaagaagttctaataatactgtggtggaaccagctgagtgggggtggtcctgtgatattgggtacctgccccttcgtcatccatggcctccaccctggtctactggcccctgaagacgcttaagtttgtaatctttatttcaaattgtgtctatacagtcacacagatatatacacatacctttcctttatgtatatatttaaaaggaatctcacaatatatgccatttgtttaattttttgaataggtaatggaatgacatcactcaaaatctaaaactctaaaaaaaggtatttatctctcattgtttgtaggattctgttattccttttaatcaaacttgttaattgagtgattcaaatcttccatctccctattcatttatcttgcctgattaatctaatagtttctgagagaaatgtgaaaccttattttaagcaaattctccttgtaattctgtcaattttttttttttttttgccattttggtttttatttgattataggtaagagttccatacaatagtgtgcgaagtattgcaaacaataaaggaaaaatacagcataagatacctcttacactctgcccaattctgtcaatttttatgtcagatatttttaggctacattctttggagcatataagttcaatatttttatatatcatagatctttttatgtaatatctatgtaataaatctctttgtccctaagaaaaatcaaaataattttcaagaaagatatacagtgaaaaaaatcttactcctaccttttttccccattgccctatagccctgaaatatgattacatagttttattttgccacttttttttttttttttagacaaagttccactcttgttgcccaggctggagtgcaacagtgtgatctcggctcactgcaacctctgcttcctgggttcaagtggttctcctgcttcagccttccaagcagctgggattataggcaaccaccaccacgcctggctaagtttttgtatttttaatagagacagggtttcaccatgttggccaggctggtctcgaactcctgaccttcaggtgatccacttgccttggcctcccaaagtgctgggattgcaggtgtgagccaccacacctggcctttgccacatttttttgcacataaacgtacaatacatattgcctattgcatttttacacttaataaaatagaggactttctaaatccatagacagagagtttcctcattatttctaacagtggcacaatgtttctttatctaactaccccacatgtgtttgtttggctaatttaacgtatggattattatttccaatctcacaatgagcaagatagtagatataccatttttcacatgtgcaagtatatctgtagcataaattcaaaagtaaaattgctgagtcaaagggaacatgtatttgtaattctgatctgtatcaaacagtaatttacactcccaacagcaaagtatatatgttcacctacatatttgcccatagaggatatcaggttttggagttttttctcccaatctgctaggtgaaaaatggtattttgtggtagttataatttgcctttctgttattgtaagtgagattgagaattttttttttttgagatggagttttgctcttgttgcccaggctggagtgcaatgccacgatctcggctcaccacaacctctgcctcctgggttcaagcgattctcctgcctcagcctcctgagtagctgggattacaggcatgtgccatcatgcccagctgattttgtatttttagtatagatggggtttctccatgttggccaggcttgtctcgagctcctgacctcaggtgatccaccagcctcagcctcccaggtgatccgcccgccttggcctcccaaagtgctggggttacaagcgtaagccactgcacctggccaagaatcttttttttttttttgagacagagtctcgctctgtcacccaggctgaagtgcagtggcatgatctctgctcactgcaagctctgcctcccgggttcacgccattctcctgcctcagcctcccaagtagctgggactacatgtgcccgccaccatgcctggctaattgtttcgtattttcagtagagatggggtttcacagtgttagccaggatggtctcgatctcctgaccgcatgatccgcccaccttggccttccaaagtgctgtgattacaggcgtgagccaccgctccaggcccgaatcttttagtatgtttaagagctgtaactctggctgggtacagtggctcatgcctgtagtccctactctttgggaggccaaggcaggcagattgcttcagcctaggagttcaagagcagcctgggcaagatggcaaaaccaaaatactaaaattagcctggcatggtggcatgtgcctgtggtcccagctacctgggaggctgaggcaggagaatcacttgagccctagaggtggaggctgcagtgagcaccactacactccagtctgaatatcagagtgagaacctatctcaaaaaaaaaaaaaaaaaaaaaaaaaaaaaaagctctaactgtaatttacttacctcacccacttttttctcttcaattgttaggcttttgttattgatttttgggaactctttatatatttatatattaggatgactattttgttggtttcctgctatcttttctagtggaagaagatgagaatatgtcttcagagtcagtcttgggttcaagtcctaactttctctttcattatggcacttggatgaaggactctttcattctgtgcctcagtttccccatgtgtaaaatgaaattaaaagcatcctgctctcatgatgatgatggtggtgtggtctccatctttttcctgaagggccgcagcagcaaggccaagaaaccgccgggggagaatgacttcgataccatcaagctcataagcaacggtgcctacgggtgagccacccggggctctggcggggggagggtggcggaggccgggtgtctcggaggtgacggccggtcctcgctctctccccctgcagcgctgtctacctggtgcggcaccgcgacacgcggcagcgctttgccatgaaaaagatcaacaagcagaacttgatcctccgcaaccagatccagcaggcctttgtggagcgcgatatcctcaccttcgccgagaacccgtttgtggtcggcatgttctgctcctttgagactcggcgccacctctgcatggtcatggaatatgtggaaggtgtggctgcctgcggggctgcagggaagatggggccgtgctcactggtcagggctgcggggtggcctgcctgagccgcagtctccatattgattagtcggcctgtatgtttatccatctatttatttctccagtcattgatttgtccatccattctacctatatatttattcagtcatctattggtttatttgtttttcatttcattcagcataaaaacattcagtctgacccattatccatccatctatccttctatctactgatgtgctaatccatctgtttttccatccatacatccatgaacctgtttttatttatttatttatttattcatttattcatttatttattttttgagacagagtcttgctctgtcacccaggctgcagtgcagtggtgcaatctcggttcactgcaacctccgactcccaggctcaagcgattcttatgcctcagcctcccgagtagctgggattatgggcctgtgccaccattcatgggtaatttttctatttttagcagagacaggatttcgccatgtttgccaggctagtcttgaactcctgaccttaagtgatctgcctgcctgggcctcccaaagtgctgggattacaggcatgagccactgtgccaggcctattttattttatttatttatttttgagacaagatctcactctgttgctcaggctggaatgtagtggtgcgatcacagctcactgcagcctcaaatgcctgggctcaatcaattctcccacctcagcctcccaaatacctgggattataggtgcggaccaccacactcggctaatttttgggaggccaaggtggggagatcacaaggtcaggggttcaagaccagcctggccaacatggtgaaaccctgactctaccaaaaatacaaaaattagccagatggcacactcctataatcccagctactcacgtggctgaagtgggaggattgtttaaacacaggaagcagaggttgcagtaagccgagatcgtgctgctgcactccaggctaggctgagatcatgccattgcactccagccctggcaactgagcaagaccctgtcccgcaaaaaaaaaaaaaaaaaagttttttgttttttgtttttttttgttcgtttgttttgttttttatgcagtctccctgtattgcccaagttagtctccaactcctgggctcaagcaaccgtcctgcctcagccttccaaagtcctgggattacaggcacgagccaccgagcccatcccatatacctgtttattaatccacctttccatccatccctcacatcccgcaatttgtctttgtggttgtccatctgtttatccatccgtatgtctgtttaccattatacacctatttttcttttttttgggggggacggcgtcttgctctgtctcccaggctggagtgcagtggcgcaatctcagctcactgcaagctccacctcctaggttcacaccattctcctgcctcagcctcctgagtagctgggattacaggtgcccgccaccatgcccgactaattttttttgtatttttagtagagacggggtttcaccgtgttggccaggatggtctcgatctcttgacctcatgatccgcccacctcggcctcccaaagtgctgtgattacaggcgtgaaccaccacacccggcttatacacctatttttcctttttctttctttctttttttttttttttttgagacagagtcttgctctgtcaccaggctcgaatgcagtggcgctatctcggctcactgtaacctccaccttccaggttcaagtgattctcctgcctgagcctcccgagtagctgggattacaggtgtgtgccaccacacctggctaattttttgtatttttagtagaaatagggttttcaccatgttggccaggctggtctcgaactcctgacctcaggtgatcctcccacctcagcctcccaaagtgctgggattacaggcgtgagccatagcttgcggcccatatattgtttttaatccatccgtgcatgtattcacccaaatgttaatccatctattgtccaaaaccacacatgctgtggctattatgacacatacatgatccctggggcctcagctgtgcctcctccaagccttccagtcaaccatccagtcactcaacgaacacctcctcatcatctccctcgtgtcacatgctgtgctaggtgccagtgacacagaggagacccaggcacagacatctccccgccatggagattccattctggtctgtatagacagacaataaacaagcagagcaagccaaagagataaggacatttatttatttatttatttatggagtctcgctctttcacccaggctggagtgccgtggcgcaatcttggtgcacagcaacctccatctcccaggctcaaggattctcatgcctcagcctcctgagtagctgggactaaaggcgcgcctccaccatgcccagctgatttttgtatttttagtagagacaggggtttcaccaggttggccaggctggtcttgaactcctgacctcaggtgatcagcccaccttggcctcccaaagtgctgggattacaggcatgagccaccatgcccagccagggcatttcatagtgaggacatgaggtccatgaggctggaggaggtgatggggaggcaggcagggagcttctcagaggcctggattatgatggaataagtgacctgctagtacaaagtctcttaggtgacaatttagatttggaggagtggcaagcaggcccatggagccgaaggcaagtgagcaagggaggggagatgaggatgaaggggcgctgatgaggagggtattccagagactggaatggcattggatttcattctgaatgcaacagaaggtcactggagcattgttgtttttttctttttctttttctctctttctttctttctttctttctttctttctttcttttttgagatagagtctcgttctgttgcccaggctggagtgcagtggcgcatcctcggctcactgcaacctccgcctcccgggttcaagcgattctcctgcctcaacctcctgagtagctgggattacaggtgcccgccaccacgcccacctaatttctgtatttttagtagagatggggtttcatcatgttggtcaggctggtctcaaactccacacctcatgatctgtctgcctcggcctcccaaagtgctgggattacaggagtgagccaccgtgcctgcctttttttttttttttttttgaaatggagtctcactcacgctgtcacccaggctagagtgcaatggggtgatctcggattactgcagcctccgtctccaaggttcaagtgattctcctgcctcagtctcccgagtagctaggattacaggcgtgtgccaccacatctggcaaatttttgtacttttagtagagacggattttcaccatgttggccaggctggtctcgaattcctagccttaaatgatccatcagtctcggcctcccgaagtatggggattacaggcgtgaatcactgcgcccagccttgttttgttttatttttagtgcattgtccaggctggagtgcagtggtgtgatcacagcttactgcagccttgaactcctgggctcaagcaatcctcccacctcagcctccaaaagtagctgaaactacaggcaggcaccaccatgtccagctaatggagggttttaagaagatttgatatgatcagatttatgttttaagaaaatccatttggaggcccattatagtagcttacgactgtaatcccagcacttacagtgggagaccaaggcaggcagaacacttgtggtcaagagtccaagatcaacctacccagcatggtgaaaccctgttgttgttgtttttttcttttcctttttttttttttttttgagacagagtttcgctctggctaaactcgttgcccaggctagagtgcaatgacgtgatcttggctcaccgcaacctcctcctcccgggttcaagcgattctcctgcctcagcttcttgagtagctggaattataggtatgcaccaccacacctggctatttttgtatttttagtagagatggggtttctccatgtcagccaggctggtctcgaactcccaacctcaggtgatgtgcctgcctcggcttcccaaagtgttgggattacaggcgtgagccactgtgcccggccaatgaaaccctgtttctactaaaattacaaaaattagccaggagtggcggtgcacgcctatcatcccagctactcgggaggctgaggaacaagaatctcttgaacccgggggcggtgagtgggcagaggttgcagtgagccgagatggagccactgcactctagcctgggtgacagagccagactctgactcaaaaaaaaaaaaaaaaaaaaaaagagaaaaagaaaaaaattaagaaaagataatccatttggctcttgtggagagagcagaatcaggagactaggaggtagatgactgctctagtccaggttcattgcagaggaggaggagagaagggggccaaatcagtatctctatggtgggtctgtgtgcacaatagatgtgctcaaatgcagattcctgggccccaccctcagagagtttctgaaaccagcaaaatctcgcagaaaagagaacagaaaaaagaaagaaatcattagctttcttggtcattggtgattgaaaaaccaatattaccttcaggaatggctggatgtaggtgctcaaaccattccatcaggaaactctccatctcttggctctgtactcccacatgtgggcttccttctagacaagccctcatgtagcaaggttgccatctagcagatctcagcttacattctatgagcttagcaattcttacaggaaaagagtgaaaattccaagggctaactcactggagcaacttgggttacatactgccccggttgctgcacatggaaggaaatctagcctttgtaggataaaaaggaaatagatattgagaaactgaaataccaatgccaattacagtaaatctggcagaggggcagaggcagtggccaacactttgggaagctgaggcaggaggatcctttgaacccaagagttggagaccagcttgggcaacacaatgaaactcgtttctacaaaaaacttttttttttttttttttgagacggagtcttgctctgtcacccaggctggactgcagtggtgcgatcttggatctctgcaacctctgcctcccaggttcaagccattcttctgccttagcctcccgagtagctgggattacagccgtctgccaacaagccaggctaactttagtattcttttttcagagatggggtttcaccatgttgaccaggctggtctcgaactcctgacctcaagtgatccacccgccttggcttcccaaagtgctgggatttcaggcgtgagctaccatgcccagccttgaacaattttttaaaaatcagctgggcatggtggctcacatctgtagtcccagctactcaggaggctgaagcaggaggattgcttgagctgggaggttgaggatgcagtgagctgtgatcttgccaccgcactctagactgggcaatggagtaagaccctgtctcaaaaaaaaaaaaaaaaaatctagtgaagaccaagaatctgcatctaaggcttccagctccaaggttcagacaccaggagatagagggctgtgcttccagatgcagttgataagtgggtagcctttgttccccaactaaacctcacctctaccaacaactgcctgcatgacccatcctttctttgagtctccatccctttgtgtataagatgagctgatgacaccaactttggaggatggctaagaggacaagaagaacccagtagaggacctggagggagggaggcccctctcagagcctcagtttcccttatctataaaacgggtacaacataacatgagaagttggtgctatggtgcatgtccagagagaggaatgcctccctttttatgcgggcccatttcctggcctgcaggcggcgactgtgccaccctgctgaagaatattggagcgctgcccgtagagatggcccgcatgtactttgctgagacggtgctagccctggagtatttgcacaactatggcatcgtgcaccgcgacctcaagcctgacaagtgagctttgatctttcccatcactccctctgtccctcgggaggccaggaggcagaatggacgggcctcatccctgagatccccacctgtgcctacagcctccttatcacctccatgggtcacatcaagctcacagatttcggcctctccaagatggggctcatgagcctcaccaccaacttatatgaaggccacatcgagaaggacgcccgagagttcctggacaaacaggtgtgtgtgcgggcatgggggtcgctgagggtggagtgaccctgcaggacctcgggaacccagggcctggtggggggcacagctctcccttgagggccctcctctggctggggcgtgggctgacagcctgcccccaggtgtgtgggaccccagagtacatcgcgcccgaggtcatcctgcgtcaaggctacggcaagccagtggactggtgggctatggggatcatcctctacgagttcctggtgggctgtgtgcccttcttcggagacacaccagaggagctatttggacaggtcatcagtggtacgtggcttggcagtgtacaggggcagagtgtggtgtgcacggagagatggacaggctcagggttccagggatttcaaaagcgaccccccagaggatcgcttgcactcaggaggtcaaggctgcagtgagccatgatcgtgccactgcactccagctgggtgacacagtgagatcctgtgtccaaacaacaacaacaacaaaaaccgcccctaagttccgttttgttttgcagatgacatcctgtggcccgagggggatgaggccctacctacggaggcccaactcctcatatccagcctcctgcagaccaaccctctggtcaggcttggggcaggtaagtccgccatgcagaggagctgagggcccactgatagagagcaggcctccaaaaccccaggcccagcctgtgctgtggccccggggcggaagacatggggggcggggctgggctgctgggttggccatcagctgtggctggaatcccttccgtcccaggcggcgcttttgaggtgaagcagcacagtttctttcgagacctggactggacagggctgctgaggcagaaggccgagttcatcccccacctagagtcggaagatgacactagctactttgacagtgagctgggacaccaggcacgacctgggtcgaggggtgggatccgggaagagggaccctggggtaagtaaagcctgggatagggcctggctaagtaccaagatgtgatgcctaggtgcgaaggtggtattttggtgggggcggggccaagtggggcggggctgacatacaggcggggctcaggctgaaatgtaggtaagaacctgagattgggctaggtgtggggcctggcctgggtgagttgtgagtgtgggcctggaactgaactagagagaggtactagcgctcagaatggcctggggtgatgccagggtgcagagcactgtaggtggagcgtggcctctttggaggcggggctagacggtgccactgagaatggggcaaggaccttgcctgggagcggagcctaaattaaatacactaatgaggcaggggcgtggcctgacctgaagacttgtaaacccgtcttgaaccaggactgggctcctgtggggatgtgatatgaggaggaaccccgtaccctcagtcacagcccatacccgctccccagcccgctcagacaggtatcaccacgtgaactcctatgacgaggatgacacgacggaggaggagcccgtggaaatccgccagttctcttcctgctctccgcgcttcagcaaggtgggccaagtctgggtgtgggacagggcgagaccccaggagggatggggcttggagagacagtgagaaacaggttccctggtgcccaaggtctcaggagcgggaagttattgatggggcgggagtctggaaggtggtaaggccacgcaagaggcaggttcgggagtctatgggacgggcctttggcactgagtggaatctaacaggaatcaggacagttgtgcagattgaggccatggtggggcggggctaggtgtgggtggggcggggtcaggacgtgggaatgaggccagcagcgaaggcggagtaaagcccagcgaagtcttgcttttatttatttatttttattttttctaataacgggcagagaagccataggccttgctttgagaagcaacttgtagaggcgtgcagggcctagcctgggctaaggagacataaattaagggggttgctgggaagatggggctgtgtagagagcagattggtcagggcatcgtcggggcagagcctagaataaaacgcagtgcctaactttgtggtgtggggcctgaactgaagaattgtaggttgggggatcatgcacaattgggcggagccaggcctcggagggtggagtgcgttttgcgggggatccactgccaggaagctgattagctccggagtgaaagtggaacccgggctggacttgcctcccaccaccacctacaggtgtatagcagcatggagcagctgtcgcagcacgagcccaagaccccagtagcagctgcagggagcagcaagcgggagccgagcaccaagggccccgaggagaaggtggccggcaagcgggaggggctgggcggcctgaccctgcgtgagaagacctggagagggggctctccggagatgtgagcaggggaatggcggagtttgggggcggggtcgaagggggcgtgtcttccataaccacgccccctccatgcagcaagcgattctccgcgtccgaggccagtttcctggagggagaggccagtccccctttgggcgcccgccgccgtttctcggcgctgctggagcccagccgcttcagcgccccccaagaggacgaggatgaggcccggctgcgcaggcctccccggcccagctccgaccccgcgggatccctggatgcacgggcccccaaagaggagactcaaggggaaggcacctccagcgccggggactccgaggccagtgagtgccctatcgtgctgccttccccaatcttccccaatgtcctactggtcatatagtgagcatcccacgagcctggtgctgtttatgaaagatctcaggtcctattcacattgcaatttgggatttttttttttttttttttttttgagacagagtctcactccatcacccaggatggagtgcagtggcgtgatctcggctcactgcaacctccacctcccaagttcaagtggttctcgcacctcagcctcccgagtagctgggattacaggcgcgcgccactacccccggctaatttttgtatttttagtagagacagggtttcttcatgttggcaaggctggtctcgaactcctgacctcaagtgatctgccttccttggcctaccaaagtgctggggttacagtcgtgagccaccacacccagcccaatttgggattcttaacattagaaacaccccaataccatggtcagtcagtgatacagaccgatacagactatgtctctatatgaggagcagtgaggcatgcaggttacctgctcagatgaaactcaccatccatcaagggtaaaaagtggaaagagcattccaggcagggaaacagtatgtgggaaatccctggccttggactaattcctaacacacttgctttctgttgcagctgaccgtccacgcccaggtgacctctgcccaccctcgaaggatggggatgcatcaggcccaagggctaccaatgacttggttctgcgccgggcgcggcaccagcagatgtcaggggatgtggcagtagagaagaggccttctcgaactgggggcaaagtcatcaaatcagcctcagccactgccttatctgtcatgattcctgcaggtaatgctgggccccacctggcaggggaggggctgccccccatttgaggcaggacagaccaatgaaaatgctgcattttccctgtccaccgtgattggctccaggctggaccaatgagaggctgctctgccactgccttgggaggagggaggagcagatacagggagatgtctatcttcttggttctgatttctgaccatggttgtgtgtctgtagtggacccacatggaagttcaccccttgctagtcccatgtctccacgatctctgtcctccaacccatcctcacgggactcctcacccagccgggactactcaccagctgtcagtgggctccgctcccccatcaccatccagcgctcgggcaagaagtatggcttcacactgcgtgccatccgtgtctacatgggtgacacggatgtctatagtgtccaccacattgtctgggtgagtactcatgggtggagtctccatcacagagtggagggtggtggggaaaaggcccctccagctcaaaccagttagcctgggtgagacacctctgtgaccctctatgcctcttccctctctaaacctgtttcttttttcttttacttttttattttaggcggagactcactgtgtcgccaggccggagtgcagtggcaggatctcggctcactgcaacctctgcctcctgagttcaagccattctcctgcctcaaccttctgagtagctgggactacagacaggcgcgcgccaccacgcccagctaatttttgtatttttagtagagacggggtttcaccatgttggctaggatggtctcaatctcttgacctcgtgattcacccacctcggcctctcaaactgctgggattacaggcgtgagccacggtgcctggccgagactgtttcttcatctgcaaaatggggagaataggccaggcgcagtggctcaggcctgtaatcccagcactttgggaggctgaggtgggcagatcactggaggtcaggagtttgagactagcctggccaatatggtgaaaccctgtctctattaaaaatacaaaaattgggccgagcgcggtggctgtaatcccggcactttgggaggccgaggagggtggatcatgaggtcaggagatcgagaccatcctggctaacatggtgaaaccccctctctactaaaaatacaaaaaattagctgggcatggtggtgggcgcctgtagtcccagctacttgggaggctgaggcaggagaatcgcttgaacccgggaggcggagcttgcagtgagccgagattgcgccactgcactttagcctgggcgacagagcaagacaccatctcaaaaaaaaaaaaaaaaaaaaaaaaaatggccaggcgcggtggctcacgcctgtaatcccggcactttgggaggccgaggtgggtggatcacgaggttaggagtttgagatcagcctgaccaacatggtgaaaccccatctctactaaaaatacaaaaaaaattagccaggcgtggtggcagatgcctgtaatcccagctactcaggaggctgagacaggataatcgcgtgaacccgggaggcggagcttgcagtgagccgacatcgcgccactgcactccagcctgggtgacagagcgagagactccgtctcaaaaaaaaaaaaaaaaaaaattagccggaggtagtggcgcatgcctataatcccagctacttgggaggctgagggaggagaatcgcttgaacctgggaggcgggtgttgttgcagtgagccaggattgcgccacagcactccagcctgggtgacagagtgagactccgtccaaaaaaaaaaaaaaaatgtggggggaggaataataactatttcacaaggtgttatgaggattctaatgcatgcagagctaagtgtcctgcatataagtttaggagctttccttgttaccaatcccactaaccctgtccctatggggtgctcttttcccagcatgtggaggaaggaggcccagcccaggaggcaggactctgtgctggggacctcatcacccacgtgaatggggagcctgtgcatggcatggtgcatcctgaggtcgtggagctgatccttaaggtgagtgcagggaaggaggcaccctgggcggagggtgggggaggcctgagcagcccctagcagagcattttcccgcattcttcccccagagtggcaacaaggtagcagtgaccacaacgcccttcgaaaatacctctatccgcattggtcccgcaaggcgcagcagctacaaggctaaaatggctcggaggaacaagcgaccctccgccaaggagggccaggagaggtgggcacagccgtaaacagcctggtctttgagcagtgggtggaacttaggcgggaggggcacagatgaggatggagaagggaagagcacgggaaaggtggcgggaacaaatgaccaacaagcaaagggaagaggacaattaagaggggctgcgggctgggcgcggtggctcacgcctgtaaccccagcactttgggaggccgaggcgggcagatcacgaggtcaggagtttgagaccagcctggccaatatggtgaaaccccatctctactaaaaatacaaaaattagcctggcatggtggcgctcgcctgcagtcccagctacttaggaagctgaggcagaagaatcccttgaacccgggaggtggatgttgcagtgagccaagattgtgccactgcactccaacctgggcaacagagtgagactccatctcaaacaaacaaacaaacaaacaaacaaaaaaagaggggctgggatgagtcacacctgtaatcacagcactttgggaggctgaggcagaaggatcacttgagcccaggagtcaagattaggggcaacatagagagaccccatctctacaaaaaacttaaaaaactagttgggtttggtggcacacacctgtggtctcagctactcggaggctgaagtgggaggattgcttgagcctgggaggtcgaggctgcagtgagctatgatctcaccactgcagtccagctgtgacaacagagctagactctttcaaaaaaaaaaaaaaaaaaaaaaaagaggggctgtaaaagtggaaggagccaagaatggaagctgtgccaaatttctaggatcagagaaaagcattgtaggagggtcttgcacatataggcaggcccaggagatgtgaactggaaagggagatgtccagagacggagggggtccaggagatggtcctatcctgttagatgtgtttagacagaactgggaaaggctagaataagaaatgtctatctggaatgagcatgccaggcaaggttcagccaactgaaatcctattttcccttatagataggaggagctaggtgggaggtgggtggggccagaagggtattctgtttgtttgtttgtttttagtattctgttttgatcagtgagtttggcccagacaagtacagggatttgggtgagaggagccagacggggttgagataagtacatttcttcccactcttataggtgggttgtagtggaagaggcgggactagaggcaggtgggaccaagttggttttgtttggatgtgtttctagcctggactgggagtggccaaaaggttgggcaggacctgaagtgggaggagggaggagccaagcagcactgagttaagggaagttctgtcttgataggtgggttgtagtgaaagacggagggactagaggggtgggcaggactagaagaggttgtttttggccgggcgaggtggttcacacctgtaatcccagcactttgggaggccgaggtgggtggatcacctgaggtcaggagtttgagaccagcctgaccaacatggtgaaaccccatctctactaaaaatacaaaaattagctgggagtggtggctcactcctgtagtcccacctactcaggaggctactcacgaagctgaagcacggtaatcgcttgaacccgggaggtagaggttgcagtgagccgagatcgtgccattgcactccagcctgggcgacaagagcgaaacttcgtctcaaaaaaaaaaaaaaaaatggttttgtttggatgagtgtttgtagccagaattgggagtggcctaaagttgggcggggcctgaagtaggaggagctaaaggaagttctatcttgataggtggattgtagtggaagagggaggagctagagaggtgggcggggcagaacaggttggttttgtttggatgcttgtttctagcttggactaggagtggccaaagggggtgggtggggactgaagtgggaggagccaagcagcactgagctaaaggaagttctttatcttgataggtgggttgtagctggagagggaagggccagaaggggtgggtggttaccgttgtgaggccgtgaaatgggaggagccctgagctctggcgtccaggtcaaggacgcttggccccctccctgtcccgcagcaagaagcgcagctccctcttccggaagatcacgaagcagtcgaacctgctgcatactagccgctcgctgtcgtcgctgaaccgctcgctgtcatccagcgatagtctcccgggctcgcctacgcacgggctgccggcgcgctcgcccacgcacagctaccgctccacgcctgactccgcctacctaggtattacctcctgcacctgcgcggggaccgagcagcgcggggtggcctggctggtgcttgggctgtactcactcgcttcacctcctgtctcccgcaggcgcctcatcccagagcagctccccagcctcgagcacgcccaactcgcctgcgtcgtcggcgtcgcaccacattcggcccagcacgctgcacggactgtcgccaaagctccatcgccagtaccgctctgcgcgatgcaagtcggccggcaacatccctctatcgccgctggcacacacgccgtcccccacgcaggcgtcaccgccgccactgccgggccacacggtgggcagctcgcacactactcagagcttcccggccaaactgcactcatcgcctcccgtcgtgcgcccgcgccccaagagtgccgagccccctcgctcgccgctcctcaagcgcgtgcagtcggccgagaagctgggagcctctttgagtgcggacaagaagggcgcgctgcgcaaacacagcctcgaggtgggccacccggatttccgcaaggacttccatggcgagctggcgctgcatagccttgccgagtccgacggtgagacgcccccagtcgagggccttggcgcgccccggcaggtcgccgtccgccgcctgggccgacaggagtcacctttgagcctgggcgcggacccgttgctgcccgagggtgcctccaggccaccagtgtcgagcaaggagaaggaatccccggggggcgccgaggcgtgcaccccaccccgcgcgacgacccccggtggccggaccctggagcgggacgtcggctgcacgcggcatcagagcgtgcagacggaggatggcactggcgggatggccagggctgtggccaaggcggcgctgagcccggtgcaggaacacgagacaggccggcgcagcagctctggcgaggcgggcacacccctggtacccattgtcgtagagcctgcgcggcccggggctaaggctgtggtgcctcagcctctgggcgcggactccaaggggttgcaggaacccgcacccctggcgccttccgtgcccgaggccccccggggccgggagcgctgggtgttggaggtggtggaggagcgcaccacgctgagcggtcctcgctccaagcccgcctccccaaagctctccccggagccccagacaccctccctagccccagcgaagtgcagtgcacccagcagtgcagtgaccccagtcccacccgcatccctcttgggctcaggcaccaagcctcaagtggggctgacctcccggtgccctgctgaagctgtgcccccagcaggcctgaccaaaaaaggagtgtccagtcccgcacccccgggaccatagccaagggggtcatcggccccgcgctgtacagcctccgtatacatatgtacacatataaataaagtgcgtccgtgctgcgtgagttttctggggctcactcctctccaggcaaggcgagacatcacacgaccccacccccatgcccaggtgctttttgggaggtgggactccagttctggttaccatggagagtggagggaattttggatagacacctcctgtggtcccacttctggtctcacctctgcaccaactgcccccaaacctttagggggagaattgaagctgcgatgctcttgtgtcccagcgcccacctgaagagaaggttaacagcctcgtccaccaatttccatttatttactcctcaacaatcctgatggcaggtattatgtttcccattttgcagacaggtagactgtgtcacagagcggttaaggcacacaatcaaggtcatacagctaggaaggggatgaactgggattcaaaatcaagtccaaactggttcctgagcccttagattttttattttttatttttttgacacagagtctcattctgtcacccaggctgaagtgccgtggtgttagctcagctcatgacaacctctgcctcccgagttcaagcgattctcctgcctcagcctcccgaggagctaggaccacagacgcgtgccaccatgtctggctaatttttaaatatttttaatggatatggggtttcaccatgttggccaggctggtctcgaactcctgacctcaagtgatctgcccatctcagcctcccaaagtgctggggttacagatgtgagccactgcacccacccgtcccccgccccccctttttttttgaaacagagtcttgctatgtgacccaggttggcgtaatcatagttcactgtgaccatgatctccctggttcaatcgatcctctggcttcagtggctgggactacaggcatttatcaccgtgcctggctaactttttttaagttctagtagagatgtggtctcactatgtagcccaggctggtctcgaattcctgagttcaagtgatcctccctccttggcttcccaaagtgctgggattacatacgtgagccactgcacctggccataagggttagatcttataagctctgctgggcttcctggccatgccattacagggctggtagttcttcaccagcggctggaaggctttccagagggctggcagctgggcacacagtgtgcccccaccccgttgctcctctccctggttccgattcatgtcacccacgcaggtccagggcccttttggggacacgcaccatttggagtggtcctctgtgctgttgaagcttgggccggctggtccagggaaagctatctggttcacattcagaacctgccagatatccgagcagttagagggcaggatgcctacagttttgtgccagaactggacctgcaggttggtaccaagggctgctgccaaccagccggagtacaggtctgcaaaggatggagagagggcacaggtagggtcagggccactgcgagggagtccctagtccacttcccctctctcagctcagtttccatatttccttttttttttttttttttgacatggagtcttgctctgtcgcccaggctagagtgcattggtgcaatctaggctcattgcaacctctgcctccgaggttcaagtgattctcctgcctcagccttctgagtagctgggactacaggcatgcacaaccatacccggctaattttttaataaagaggggtttcaccatattgaccaggctggtctcaaactcctgatctcaagcaatccgcccacctcggtcttccaaaatgctgggactacaggtgtgtgtcaccgcgccctgccacagtttccatatttctgagctcagttgtcaattcccagtcctgggaatgatgacattaatattaattgcccttcccaaatttgtttttgagacagagtctcactctgtcgcccaggctggagtgcagtggtgtaatctcggcacactgcaacctctgcctcctggtttcaagcgattctcatgcctcagcctcctgagtagctgggattacaggtgcccgccaccacacccggctaatttttgtacttttagtagagatggggttccaccatgttggccaggctgttctcaaactcctgaccgtgtaatcagccagcgccctccaccatgcccagataatttttgtacttttagtagagatggagtttcaccatgttggccagactggtcttgaactcctgggctcaagtgacccacccgccttggtctcccaaaatgtggggattacaggtgagccaccgcgtccggccctgagtgtttttaattaattaacttatttattttgagactgggtctcattttgacaccccagctggagtgcagtggcaggatcatgactcacttgcagcctcgacctcctgggctcaagctgttctcccacctcagcctcctgagtagtggggactacacgtgtgtgccactatgccccactaattaaaattttttttgtagagatggggtcccgctgtgttgcccaggctggtctcaaactcctgggctcaagcaatcctcctgcctcgactgggattacaggtgtgagccactgtgcctggcctatttatttgtatttatttatttatttatttattttgagacacagtctcactctgtcacccaggctggagtgcagtggcactatcttgactcactgcaagctccaccttccgggttcacgccattctcctgcctcagcctcccgagtaactgggactacaggtgcccgccaccatgcctggctaatttttgcacttttagtagagacagggtttcaccgtgttagccaggatggtctcgatctcctgagctcgtgatctgcccacctcagcctcccaaagtgctgggattacaggcatgagccactgtgcccagcctatttatttatttttaaataaagacagggtcttgctctgtcacccaggctggagtgcagtggagtcattatagctcactgcagtctgaaactctgggctcaatttatcctcctgcctcagcctcccaagttgcttggctaatttttaattttgtagagatgaggtcttgctatgtttcccaggcttgtcttggatgcctgtcttcaaatgatcctcctgcctcagcctcctaagtaactgggattacaggagtgaggcaccacctctggcacccaaatgacttacaggtaccacttcattcacaattttttaagtagatgtcagtatccccatttttcagatgagtagaccaaggctcaggtgaagttatacatcacacagcaaaacccagggtttgaacccaggtctgttcactgatcatgtgattatagctcccaaacagacctggtctctaccgctgacttgaactcagccatggccacaccagtcaccctgtctgcagagaaggagctctccaaccctcaaccttgagactcaccatctccaaatttgctgaacttggcaaagctctggaaaacagccccggcctgggatgtgagtgtgatgctgctgttccagggttcttggctaacgtggtggcccttgaccacattctccaagtcggggaattcctgggcaaagatcccttccagctggtagttatagacccaggggtaggtgtaggtcagctgcttgcctggaggacaaggggaggaggaaatgcaagatcgttccaggttctggtcagtaaacccaggactcatcctgtgtccctgactcgacttacccatcttcgagaactgagcgaagggaaaagacacacagagcagggtctgcccgtaggtacaggcgctatgaggccagctgtatgcagcagaggaggccggtggagggaagttaggtacactgtggaccagccagaagcccccatcgtggtcaaggagcaggacacctggaccaaaagaaggcattaggggaggtcgggcgcagtggctcacgcctgtaatcccagcactttgggagaccgagacacacagatcacctgaggtcaggagttagaaatcagcctggccaacatggcgaaaccccatctctactaaaaatacaaaaattagctgagcgtggtggtggacgcctgtaatcccagctactcaggaggctgaggcaggagaatcgcttgaacccaggaggtggaggttgcagtgagctgagatccaccactgcactccagcctgggccacagagcaaaatttcatctcaaacataagtaagtaagtaagtaaataaataaataaataaataaataaataaaaatttaaaaaaagaaggcaggccccacgcagtgtaatcccagcactttgggaagccgaggagggcggatcacctgaggtcgggagttcaagaccagcctggccaacatggagaaacctcatcactactaaaaatacaacattagccgggcatggtggtgcatgcctgtaatcccagctactcgggaggctgatgcaggagaatcacttgaacccaggaggcggaggttgcagtgagccgagattgcaccattgcactccagcctgggtagcaagagcaaaactccttctcaaaaaaaaaaaaaaaaaaaaggcaattagagggtattgctccaggcctcccagcaagctcatctgcaatcaggaacaccctcagtttgcagcggggcttagagagggtgccagcagtgttagaaccacagctgagctcagtttttgcaggcataaattcttatagtccagaataacgccaagagtaatgtaaggtagggaaacaggccaggtgtggcggctcatgccggtaatcgcagcacattaagaggccaaggtgggtggattgcttgaaccaggacttagagaccagcctaggcaacatggcaaaagcccactctacaaaaatacaaaaagtaggccaggtgtggtggctcacgcctgtaatcccagcactttgggaggccaaggcaggtggatcacctgaggtcaggagttcaatatcagcctgtccaacctggtaaaaccccatctctactaaaacatacaacatttagctgggcatggtggcgcacacctgtaatcccagctactccagaggctgaggcagaagaatcgcttgaactggggagatggagattgcagtgagctgagattgcaccaccgaactccagcctgggtgatggagagagagtgccgcaaaaaaaaaaaaaaaaaaaaaaagccaggcgtggtggggggtaccggcaggcccagtacttgggaggctgaggtaggaggatcacctgagccctgggaggtcaaggctgcagtgagctgtgatactgcactccagcctaggtgactgggtgagaccttgtctaaaagaaaataaaataggggaaatagatgcccaaggtctgacaggggagatctcccaccccactatggaggtcaggggttagcttggaaaaatgcataggaactcggctgggcagggtggctcattcctgtaatcccagcactttgggaggccaaggcgggtagatcacttgaggtagaaaccaggagttcgagaccagcctggccaacatggtgaaacctcgtctgtactaaaaatatgaaaattagcctggtgtgatggtgcgcctttaataccagctacttgggaggctgagacaggagaattgcttcaaccccagaggcagagattgcagtgagccaagattgtgccactgcactccagcttgggtgacagagcgaactcccaccgtctcaaaaacaaagaaaaaaaaaagttggggggaatagatgcccagggtctgacagtgcagatctccccgaccaccccatgcacgtcaggggttaccttggaaaaatgggacccgagtctctccccagcccccaatccaggcctcacccttcgtgtgcccacgcatggaagagtcctgagccttgctgggttgaggcggttggtcattgtagagcaggaaggcgagctgcgggcggataaacggaggcaacgtgaaattcctcccaggcagggcagccctagagtttcgcccctagttggcccggggcccccttcacctggctggtgttgctccggtacagcggctgcaggcttcggcccacggccccctccgggctgttgatgagtgccctgccgtcccgccagcctccggagctctcgtccagatacttgtactgcagccctctctgcgccgcctccccggaccctctaagagctggcagcttgtagaccacgaacctggaggtcggagaatgcacagaaataggagagagggaagagaaggcaccccagggttccccgaggaggtagccatcccggttgagtgaccgcagccggaccccggggcgatggtaggccccccgctgcgcactcaccagtctacaggctgcccggagtccccgtagcaggtcagggccccggcggggacgcacagcagcgctgccagcagcagcgggatcatagctgctatggggctgagatccaggaatctgtgtcgggactgcggggcgctgggttacatcagaggccaggactggcacctggcgcctttcacttccctaaacttgcctgggaaccggggcggggacatcacgagggtacagactcctcccccgagacgcgatgctgcgttttggagaggcaaaaggcaacgctgagtctgcccagaccacgcccacgacgggcccggcgctccagcgtctcctggagcctggccaccgttccttttcgtggtagctaatcccagcccacgctcttctgtctgacccaactcccgcccgggtttctggatcaggcacaagtttgtattttattttttattccagccctacaacctgggtccaactcttgggacctttgttcttcctctttttttttttttttttttttttttttttttgagacggagtttcactcttgtcgcccaggctggagtgcaatggcacgatctcggttcactgcaacctccgccttcctgattaaagcgattatcctgcctcagcctcccgagtagctgggattacaggcgcccgacaccacgcccggctaatttttgtagttttagtagagacggggtttttccatgttgactaggctggtctcgaactcctgacctcgtgatccaccagcctcggcccccgaaagtgccaagattgcagaagtgagccactgcgccccttaagaagcatttgtgttccagtgtatcttcccctttttctttctttttttttttccttccttttttttttttttttttcccggacaatatctcgctctgttgcccaggccggagtgcagtggcgcaatcttggctcactgcaacctctgcctccccagctcaagtgatcctctcacctcagcctcccgagtagctgggatcacgggcacatgccactatgcccagctaatttttgtagttttttttttgaaacacggtttcaccatgtggctcaggctgaactcctgagctcaagggatccacctgtcttgcctcccaaagtgctgggattacaggcatgtaatccacgccacccagactctcctttttcattctgcacgttttctccaggatcccctgagctagcaaagaggtgactgtatgtttgttttttgtcgttttgagacaggataatggtttctcacccaggctagaatgcagtgactccatcacagttcactgcagcctcaacctactgggctcaagagatcttcccaggtagctggtactacaggcctgtgccaccacacccagataattgttcattgcagagatgagggtctcactatgttgcccaggctgctctggaactccggggttcaagtgattctcccacctcagcctcaaaggatcatggcagggcaaagggctatgggaatctgagtactggcttgaaactgcctttgcaaaaattatgacagaaaattatgtcagtgaaagagctctgacctaaccaactccatcttgcctttaatctccaaactgcccttgcttggtcattcctggagtggggtcaagctaactttttttttttttttgacacgttgtctcactctgtcgcccaggctggagtccagtggtgtgatctcagctcactgcaacatccgcctcctaggttcaagcaatcctcctgcctcagcttcctgagtagctgggattacaggcatgcgccacatgcccagctaatttttgtatttttggtagagactgggtttcaccatttttggtagagatggggtttcaccttggggctcaggctggtgtcgaactcctgggctcaagtgatctgcccgcctcagcctgccaaattgctgggattaaagagggagccaccatgcctggccccaagctaattttgggaggaatttagtttatagcttaaatgataatagcccttccccaaactaaactgcctttgtagaaataatgaaagggcactaggttaggaggatgagaggagcctgaattctgctaaactgtaggtgtagtagttaaattatgaccagccatttttccggccgggtgcggtgcctcacgcctgtaatcccagcactttgagaggccgaggctggcagattacctgaggtcaggatttcgaaaccagcctggccagcatttcgaaaccccatctcttctaaaaatacaaaaattagcccggcatggtggcatgtgcctgtaatcctagctacctggtaggctgacacaggagaatcacttgaacccaggaggcagaggttgcagtgagccaagatggaacaactgcactccagcctgggcaagagcaagactccatctcaaaaacaaaaacaaagatggccagccattattctggaggtcacaaggtttgcaacttccccagttatttctgcaaataacatgactattgcaaaacctaacgctggcctttttagatgtctttttaggctttttgcatatctgacaactggatgactccacccagactagcgactctatggtccccacccagaagctgactcagcaactgttttccacagctccaggattgcagcaaggcacccattccctagccctcctgcccaccaaactgttcttgaataaccctagcctctgaattttcagggaggctgattcaagtaataaaactcccatctcccatttagctggatgtatgtggattaaactctctctattgcaatccctctgtctcgataaattggctctatctggacagtgggcaagatgaaccccctgggcagtcataggctgtgaactcttaaatccagggagatgtttgctgtcaatgtccgcagggttcaaggcagaagacaaggacagtgtagcctgaactgggtgggaaaagagaggacagcaaggcctccagtgcccaagggggcttgttggagttgaggggtgtcactgtagtttaggagatgagggtgtgtaaggccctctaatatgacctctaggtttacagcctcctgccatcttccagcctccaaaacccaaaaattcaggccaacgctgaagctttatctgggaggggcatttttataggacccataaccattgacagttaatatcagccacaataagggaccttcaggagccgctttctagacccagggtctctgggaagcctcatcccacaccctctcctgctgtccagggccatctgggagctggtctgagtgtccactgagtccgtttatttggcggtctgtctcactgggtttgcacgacagtttggacatctctgtgtggctccctgtggctgaaggcttgtcggattttccgtaagaggctcccccagggctgtctatgggtccgtgtttgatatttgggtggatctttgggaacgcgagtccaggagagggtccattcgtgggaaaaccacccagcattgtgtcacgcgcgtccgtgtgaagagaccaccaaacaggcttcttgtcccatccccagtcactaggagagtccaagtgccagggcagggctcaaaggtggcgcttcatgtgcaaggccaggtggtcagagcgcgaaaaagcacgtgggcagagctggcagcggaaggggcgctgccccgtgtgtttccggtagtggcgggtcagctcgtccgagcgcgcgaatctccagccgcagccttcccacgtgcaggcgtatggcttctcccctaggggacaaggaagccataagcgccactgtctgcccagtcatgtccccgggtcccctgcatctggccacacccctttactcagcctgggctgggactaggatgaacaaagtgaggcccctagggcacaaaatttaaggaggcactcactctcagaggccagccaagtccaagtcccgccctctgcaacccttcttcccctgtaactacagcgggcgccgcgccctttctcatgtccggggccccgccccctcacctgtgtgcgtgcgcagatgcgccttcaggtgggagctcttggtgtagctcttgccgcaacccgggtgcgcgcacgtgtgcgctgcctgcctcttgcgcgcccacgaacgtcggcctcgcttggatggcgcggtctcggctatcacacctggatcctctgcagtccccccgagtccagtgcccaccgtcccgggtcccaaacaactcaggaaggagggggacgtggcgggaccgggcgcgggtccctggagcccgcggaagagctggaagtgcccttggtactgaggcgccgggtacatcgcggggtacccggacagtagcccgtagggggcgcccgacgccgcaggcactgaaagcccggtccgcgggaagtagccacccgaggagccggcgccgggccccgggtacaccggttgcagcgccagcgccttgggctcgggggccggggctggagccagggctgggcccacgaaggcgtcgggagcccgggctcgcagggcagggcgcacccaacccgagtgatcctccgaacccaaaagcccagccaccagccccgggccgccagcatatgcgcccagagtctcgggcggcggcggatattgcgccccggaggcctcgctgggcgccagagcgcaggtctggggcgcgccaccgggctccgggcccgagaagttggtgaggaggagatccaggtcccaggtggcgtccgcgcccctctcatcgtcctcttcctccccgggctggtcctcagacttcacgtggaggggcggctccgtggggtcaggaggacccgggcccatgtcctgcgcctcttcggagcgccaccactgcgggagggagcaggcagctcgaggttcggtggacactggggtgccctgcccagggacatcgcgggctggacactctgacgcagaggctttggaaaggggtcttgtttgcctgtctgtctgtcccacttccccaacactgcccctctaaccgcccctctccccgctccccccccagctccagggacagaaaccgatcaggtctggctggagacaggagataagacttccactatctggaaccacactcggggatgggggaaggggtagcagagctgctggagatggaaaactggcaggggacgggggagaggatgccagccttgacttagttttcccccagaacatccctctccttccctgtctcccaaaacaagattaattccgaaattttggatgtcccccagacacactcatcatttcccgctgatatctggaagattgtctgtgagcctagatctcgttcctttttttttttttttttcttgagatagggtcttactcttttgcccaggctggagtgcagtggtgcagctcactgtatccttaatctcctgggctctaatgatcctcctgcatcagcctacggagtacctgggactacaggcacacgcccccatgcctggcctaatgtttttggtattttttgtagagatagggtttcaccatgttgcccaggctaccttcgttttctattaccgaaatagatcacacttagaacctcaaacccctagaccaccctcctcaccccctgccagactaagctgagatctcctctcctggactgagcgtacctcagtcctggttaagtctcttgatttcaggtcaagatgcaggtctggaccccaagatctgtgactgtggccctggattccagccagcccacctagaccccaccttctaggccccaccttgaggaagtcatcctgtgtgtccgggaaggggcccagggcggtcagtgtgctgatggagggcaaggcggtctcggctgtggccatggctggctggtgcccaccctgggcctcaagcctcctcttcctcggctgcctcgtgaactctgaggctgtgatagccccttcgagggctcctctctgtccttagctgattggctgcagcctctgataaggcaaagcaaggcaaggcggcgggggggcactgtttctggggcacaaacttcacgttggcctgtctggggctggggttaaagactaaccctgtgtccaaagccaagtcaaatatcaagggttggggggttcagggtttgagggtccaggtgctgggtaaaaacagacattgggtctccaaagaaggagagacttgggggtcttccctcagttaactttcctggaaaaggcagaaagggtattctgggaagaagctgtgggaccccctgtccccctgattgaggctccacagccctccccctccccagtaaacagcaacaaccgtgctgatggcgggacttggcacgagctccccgccaagcattatcagacaccccagacgttggaggctgctatcaggtgggggcccaggccagctagagctctgtcctccggtgaaggggagggctgggagttgggtcttcaaattagcctggcgttcaatttgcctgggttgggacctcccagggtctcagccctgcagcaggaggaagcccctgacaactggcccaccattgtctactggggacccttgggtggcactgcatgggactgcatggaggctggttcagtgccagctgctttagtgcgatgggggcagccaagggaaaagtgaccctctctcctcctgggtgggataggaccgttggatcaagccacaggcagtacctgacctgcaggagaccagtgccctggctctgggcctggctgctccttgattctgcccaacatgaggagaggatctgagtttctacaacaggaacctccactctggtgccctgggagcctgggaaggggacatggatacgtattacagacacataactcatagtcactcattggaagactgaggcaggaggatcacttgacaccaggatttcaagaccagcctgggcaacataaaacctatctctccaacaaaaagctgtgagtggtggtgcatgcccatagtcccagctactcaggaggctgaggtgggaggattgcctgagcccaggaggtcgggactgcactgaactataatcacaccactgcagtccagcctggggcacagaaagcaagactctgtcgctggaaaaaaaaaaaagttgggtggccatctttattcctggcagatcaacctgggtgacacaaacaaaaacaaggccaggtgcggtggttcacacctgtaaccccagcactttgggaagccaaggtggggagatcacttgaggtcaggagttcgagaccagactggccaacaggatgaagccctctctctgctaaaaatacaaaaattagctgggcattgtggcacatgcttgtaatcccagctatttgggaggctgagctggagaactggttgaaacttggaggcatggggccaggcgcagtagctcacgctagtaatcccagcactttgggaggccgaggcaggcagatcacctgaggccaggagttcgagacaaacctggccaacacagtgaaaccctgtctactaaaaatataaaaataggccggggatggtggcatacacctctaatcccaggtacccgggaggctgaggcacaagaatcacttgagcctgggaggcagaggttgcagtgagccaagatcatgccactgcactccagcctgggctacagagtgagattctgtctctaaaaaacaaaaacaaaacaggcttggagcagtgagtagtggctcatgcctgcagtcccagcactttgggaggccaaggtaggaggaatgctcgagcccaggagttcaagaccagcttgggcaacatagcgagatcccatctctaaaaacaaaaacaaaaacacagttactcacaggaccatgcaattacataatgacatgagttcctgttccctcagtcacactgatcatataatccgtgcacatataattgtgtgtctgtctatgtatatggactatgcacagacatacaattcccaggcactaaaacacaaccctatgctatattggttacacaatgtcatagccaaacaatctctaaaacacagaattcataatccacaggcaggcacacagttatacaatcctactgacacaatttagccgtaattgagcagacacacatggggagtcagatacattgtcacagaactttttttttttagatagtgtctctctctgtcacccaggctggagtgcagtggcatgattttggctcactgcaacctccacctcctaggctcaagtgattcctctgcctcagcctcccaagtagctgggattacaggtgcctgctaccacgccacgctaattttttttttttttttttttttgagacagagtttcactcttgttgcccaggctggagtgcaatggcatgatctcagctcactgcaacctctgcctcctgggttcaagtgattctcctgcctcagcctcccgagttgctgggattacaggcacccacaagcaggcctggctaatttttgtatttttagtagagatggggtttccccatgttggccaggctggtcctgacctcaggtgacccaccctccttggcctcccaaagtgctgggatgacaggcatgagccgccccagccagtcaaaacctacactttatacagtcacaccaccggtcacttttacaatatgtaaagtaattatttagtcacagttgcatagctaccagtgcccaaccgtaggggatgcacccagttaaacacagacaaacgcaaggacatggcatcacaggtcctgagaatcaagacacacacatttctcaacagatacacaatcagaatgggtgcaccacaaatgcactacacaaaaagacaaaacaggcggggcgcggtggctcacgcctgtaatcccagcactttgggaggccgaggtgggtggatcacttgaggtcaggagtttgaggccagcctggccaacatggtgaaacccgtctctattaaatataagaaaaaaggccaggcatggtggctcacacctgtaatcccagctactcaggaggctgaggcaggagaattgcttgaatccagtaggcagaggttgcagtgagccaagattgcgctactgcactccagcctgggcaacagagtgagaatccgtctcaaaaaaaaaaaaaaaaaaaaaaaattagccaggcatgatggcatgcttcagtggtcccagctacttggaggctgaggtgggaggatcgcccaggaggtggaagctgcagtgagctatgatcgcgccactgcactccagcctgagcgacagaacgagaccctgtctaaaaagaaaaaacaaaaacaaaacaaaacaaccacatagactcacagaatcacacaagttcacacacacacacacatacacagacacagacacacacacacacacacacacacacacacagagtcacaagtatctacatgtgcttcctgggacagactggcagaaaggtttgctaagatcgcccacttggagctcgtcttccccacaaccagcacccaattagagaactcgagtctggcctcctgggttcaggaggacgcctagtgctcgcgccagaatttctttgtttaattcttgactccctccgcacacaccccctgcaactgaccaaccaggagtgggccgagccctttcctacggccaataagaggagaaacccagctggccaatcggtttcccgcactcgtcttccgcccctaccccgtccgcttcttaaaggggctagcctatctctgtctgggccccccgatttccacaggcaaggctaccttagcccttttaaaaggcagagctgcggagggggccggattctaggaggaaccaatgaaaagcctcactcggcctccgctcctcccacttcttgctgaggtcaaaggcctgcgtcagttgcactgtagcctcggcagtgaaccgggaggtactaccaggtaaggaaggtgcggtagccccagccgtgggtgagaggagctccgctctgacacccccgctcctgtaggtcgccgtcgttgctccgctcgctctgagagagcatggccctgagaggcgtctccgtgcggctgctgagccgcggacccggcctgcacgtccttcgcacgtgggtctcgtcggcggcgcagaccggtcagtgtggggtcgggagtgtggagggaaggagggaggaactgggggtttagggactttccggggtgactttcccgttctgtgcttgcagagaaaggcgggagaacacagagccaactggctaagtgtaaggacctctggtcgcaccgtgtgtctgctgcccctgttcagctgtctgtctgccgcaggtggactctgtcccagaatccgagagctgcccgagcggggtggcagggtcgtggccagggtcagaggcactaaggcagtgagtgcgctgtgcctgcggggccggagaaaagtcacctgatcagtctcgcttgcagctcgcactagccggggggcgacatgggtgttggggggtagggctgatgagggtccgagaagggagggcacagtgatcttgcggactggaccgaggcgaattccccttcccagcctcgcgtcccgagtttgactggcaggacccgctggtgctggaggagcagctgaccacagatgagatcctcatcagggacaccttccgcacctactgccaggagagactcatgcctcgcatcctgttggccaatcgcaacgaaggtgggcgggctggtgggtgccctgagactgctcctccgcctggagccatagccaccccacctcaaggcccctctgtccttggggctggggcttcctgtggcctaggcctgggcctgaatttgggcactggtccctttgcagtttttcatcgggagatcatttcggagatgggggagttgggtgtgctgggccccaccatcaaaggtaggaacaagtatctctccacacactgcagaaccctctgtattctgaaagcctcttcctccttccctccctccctttcttccttccttctctttcttttcttttccttttctttcctttcttcttcccccccaacagagtctggctctgttgcccaggctggagtgcagtggcacgatcttggctcactgcaaattctgcctcccaggctcaagcgattctcctgcctccacccctctagtagctgggattacaggtatgtgccaccatgcctggctaatttttgtatttttagtagagacagggtttcactgtgttggccaggctggtctcaaactcctgacctcaggtgatccgcccacctcagcctcctaaagtgctgggattacaggcatgagccaccacgttcagccttctttttgagatggagtttcgctcttgttgtccaggctggagtgcagtgatgcaatcttggctcactgcagcctccacctcccgggtttaagtgattatcctgcctcaggctcccgagtagctgggattacaggcgtccgccaccacgcctggctaatttttgtatttttagtagaggtggggtttcaccgtgttggccaggctagtctcgaactcctgacctcaggtgatccacccgcctcagcctcctgattacaggtgtgagccaccgttgcccggcccttttcttttttttttttttttgagatggagtttcgctctgtcacccagcctggattactggattacagtggtgcgatcctggctcactgcagtttcctcctcctaggttcaagcaattctgccacctcagccttctgagtagctgggattacaggggtgcaccaccacgcccagctaatttttgtattttttagtagaaatgggatttcaccatgttggccaggctggtcttgaactcctgacctcaggtgatccacccacctcggcctcccaaagtgctgggattataaacgtgagccaccgtgcctggcccctttgtttctttttttagagacagggtctcactgtgttgcccaggctgttctcaagtgatcctcttgccttactgaaagcccccttctttccctaagccacaatttcccagtctgtaaagtggggctgttgtcccaccctctgaaagtggctgtggagatgaaatgaataaacctcagctagggccagcttggtgcctgcctccttgtgtgtccttattcagccctgtctcttgggtcttagctgggcagggccctgttctctattgtcctgctttcccctcctactaccaccaggatatggctgtgctggggtttcgtctgtggcctatgggctcctggcccgagagctggagcgggtggacagtggctacaggtcggcgatgagtgtccagtcctccctcgtcatgcaccctatctatgcctatggcagcgaggaacagcggcagaagtacctgccccagctgggtgagtggctgcccatggggcctggtggaaggaagacagtctctgaggtctggaactcaagggtggggctgtcccctgagcctattctgtccctatctcaaagatagcataagtggccacctggacccccgccagaccctgggcttcacctggagatctgatccctggccagcctgactgtccccctctgtgaccaccgtcatctccctatgctttctgtgttccccagtccagcccaaagtttaaagtccaccaggttcctgctggccatttgcagtggctcacacctataatcccagcactttgggagggtgaagtgagaagatcccttgagcccaagagttcgaaaccagcctgggcaacgtaaggagaccccatgtctattagaaaaacaaaaaaaggaaagagcctatgtgacctgcgctaagtggacgttggccctcttccgtggtgtctcggaggtgttcagctgcttcaagatgaagctgaacatctccttcccagccactggctgccagaaactcattgaagtggacgatgaacgcaaactttgtactttttatgagaagcgtatggccacagaagttgctgttgacgctctgggtgaagaatggaagggttacgtggtcggaatcagtggtgggaacaataaacaaggtttccccttgaaacagggtgtcttgacccatggccgtgtccacttgctactgagtaaggggcattcctattacagaccaaggagaactggagaaagaaagagaagatcagttcatggttgcatcgtggatgccaatctgagtgttctcaacttggttattgtaaaaaaaaggagagaagggtattcctggactgactgagactatgatgcctcgtcacctggggcccagtacagctagcagaatccgtaaacttttcagtctctctaaagaaaatgatgtctgccagtatgttgtaaaaaagcccttaaacaaagaaggtaagaaacctaggaccaaagcacccaagattcagcgccttgtcactccacatgtcctgcagcacaaacagcggcgtattgctctgaagcagccgcatattaagaaaaataaagaagaggctgcagaatatgctaaacttttggccaagagaatgaaggaggctaagaagcaccagggacaaatcgtgaagagacgcagactgtcctctctgcgagcttccacttctaagtctgaatccagtcagaaataagattttttgagtaacaaataagatcagattcgcaaaaaaaaaaaaaaacccacaaggccctgtgtgaccaggcctctgctgacctttccacctcatctctggccactcatgtgatcctcccagccagacttagctacttgaaattctccagaagtaccaccagttctttacacatctgttccctctcccagcactgctcttccccacagcctcctcctgcttaactcctcacacccttccagtttggccaactccttcctgattccctgggtccccctccccatcttggcattgtgatcatgactttggggtaacctgtctcttgaaagcagggccagatctaacttagttatgaggtctgactcaggggcgagggtaattttttttttctttttttgagacaaagtcccgctccgtcccccaggctgaagtgcagtggtacaatcttggctcactgcaacctgcggttccccagttcaagcaattcctgtgcctcggcctcccaattagctgggattgcaggtgcttgctacccgtgcctggctaatttttgtatttttagtagagatggtgtttcactatgttggccaggctggtctcgaactccagacctcaagtgatccatctgccttggcctcccaaagtgctgagattacatgtgtgagccacctcgactggcctaattttttgtatttttagtagagatggggtttcaccatattggtcaggctggattttttttcttttttgagatggagtcttgctctgttgcccaggctgtagtgcagtggcatgatcttggctcactgcaacctctcctgcccgggttcaagcgattctcctgcctcagtctcctgagtagctgggattacaggcacccaccaccacatctggctatttttttttttttttttttttaagtagagatggggtttcaccatgttggccaggctggtctggaactcctgacctcaattgatccacctgccttggcctcctaaagtgctgggatgacaggcgtgagccactgcaccccgccacgaggataatttttgagtaaggggatgtatcagggaccaggcagccttgtgactttgtcttgtgcctgcagccaagggggagctcctgggctgcttcgggctcacagagcccaacagcggaagtgaccccagcagcatggagaccagagcccactacaactcatccaacaagagctacaccctcaatgggaccaagacctggtaagggttctgggtggtgggcaggtggtgaacaggggcaaaggggcactggtcagacccctcaccgactgttccatccccaggatcacgaactcgcctatggccgatctgtttgtagtgtgggctcggtgtgaagatggctgcattcggggcttcctgctggagaaggggatgcggggtctctcggcccccaggatccagggcaagttctcgctgcgggcctcagccacaggcatgatcatcatggacggtgtggaggtgccagaggagaatgtgctccctggtgcatccagcctgggggtaagtggcagccactttgggaatgggtgttgggtcacctgcggatgcggctttgtcaggcaggctccgtgctggggacgcggctccctgtgcctgtggagcccacacagtggtgattcttactcagccggactcgctgacgtgctgaaaactgcccccatttggtgaccgtctcgctcatcccggctctgcccgggacacatgggcctgaaccagctcagtcatttgactcacagtgcatcttctggcatccgtcagcctcctggctctgagcatcgaacccagatgccaggctgggtgggactgtgtgcaaaccgagtgagcaggcaccgagcttcagtgccagggccatctgtgatgtgaaccacaacctgagtccccctgcgtggggtggctggggaggaggctttccctgcttcagagttggttctgcataggccctcttggtgtctcttgggtgggcctgaggcgccatctcaaccctacagggtcccttcggctgcctgaacaacgcccggtacggcatcgcgtggggcgtgcttggagcttcggagttctgcttgcacacagcccggcagtacgccctcgacaggtgtgtgagggctgcagtgagattctctgggggtgtggggcagcttgggtttcactctctataccatgggtgactccccagcccccacccaccaggcctgagttccttgctctggaatgaccagtgacgtccttctgagcagctgtgggctgagtcaacggcagggccagggcaagcttgggggcactgaggcagcctgggaaggcgtcctggagcagggggccccaggacagggacggggtgggagagtgggcctcccctcgctcttaccctgccattgcccatgtaggatgcagtttggtgtcccactggccaggaaccagctgattcagaagaagctggcagacatgctcactgagattaccctgggccttcacgcctgcctgcagctcggccgcttgaaggaccaggacaagtaggggctgtgtggtgggggcggggggatggcagcggtggctggaggaccttgtgtccttcctggagagaaaggtccttcctgcctggtggccctggggacctgaaccttctgctgtccctcttgtccttgatgggctgggctgaggacagccccactggtccctcattgggagcttggctgcatcagggaatccccaccccgggctaggtttgcttggagcatcgggatgccaggatccccagtccttgttaccctcatgtgccactcccagggctgcccccgagatggtttctctgctgaagaggaataactgtgggaaagccctggacatcgcccgccaggcccgagacatgctgggggggaatgggatttctgacgagtatcacgtgatccggcacgccatgaacctggaggccgtgaacacctacgaaggtaggagctggacctcagagggctcactgaggcctcagtgtctggggagggggtacagggaggtgggacggggacaggtctgagtccaactccacctatcactaagtgacagtgtgacctggggcgagccttacccctctgtccctcatctggagttactcacatggggactgtggaagtgaagtgcttcatgcagcacacagaggccccatcaggccttgcgaggggctcccagctctttctcccacatgctcgggaggagggatgttcctgagacaggtaagctccgaaggcagcccaggggtgaggcccgactcctagcaggctggtggacgcaagggagtgagcgaagctacacgcaggaatcaacgctccattttgttaagagacaaaagtcatcttcagatgacggtgtttgcaccctgtaactgatggtgatttacatgggggtccagaaccccttgcttggtgggaagacagatgtggaaaaagatacttaaaaaaaaaaaaaaagtgcaaacccagcatgcgctatgtagaaatagagggaggtatgaggaccccccgggcagagatgcttccagacagagagaacagcaaatgcaggaggggtgccttccctgcgcaccttgcaaccccagatcttgtctctatctggcatctggggggtggggggatcctacaaatgtgagaatgaccctgaggacaagcagcgggcgccatgagatggttttatgcagagaagggatgagtcagatttggtgctttaggggctcggcgcagtggctcacacctgtaatcccagcgctttgggaggctaaggcaggaggattgcttgagcccaggagttagaagttatgatgagctatgatcaccccactgcactccagcctgggtgacagagtgagaccctatctatatttaaaaaaaataggtttgtactttaggaagtaaacagaattggctctaaaaaggaggctacaatctgccttctgcttcaaggagctggggaggagcaaaggatgagacaccagggcatggggtgtgggattctctgggagaggcggcttcagatgggcagaggtcagctgaggcaagtgactgctcttccgatgtgctgtccctcctatccctcccgagggtaagaaagggcttgctgtgtttccttggagctcaggggtgctttcagcctctgtggcaaggaagcgtggccaggttgaaaatcaaacatttaataaactgtggggctgggggtggggagaacttgccaagggtggggagcacgaagcctgggcctatggcaggggctggacttgctacattttgggagttcagcacaaggagctttgggtttttgtttttttctgccaagatgcattatagaaccatgaaaaacaatttctcagtgtggcccaaatggtggcctcacagtcttctcctggagactgtcactaaggcgtgagtctcccggcagctgtcagcattcaccatctctgttggtctgtacttctgaagcagtggcctggggatacatgaaaattgattttaaagggaagttgtgagctatgaaaactccaaaccgactctgtattaatcttgtccaggtacacatgacattcacgccctgatccttgggagagctatcacgggaatccaggcgttcacggccagcaagtgagccgctccatcaggggcccgaaactctcaagcccctttctggagagatgcctggctggaccgtaggagcgctgtgctctgagcttagaaagggaggtggcggatggagtgggaagtgagagacactgatttttaaatatcaaaatttcccttctgaagtcgttcagatgtgttccttaaaaagaagatggaattctctgtagagcgtctcaatccacttttaaccatggatgagagcagactccatttaccctgaaatagcagcttctcttgagaggagagtgacatggaagcaactccgtctgctgcagctgaccccctcacactgagttcacagtgcgccctccctccctcccatctgggggtagtgccttatgctgggtgttggagcagagtgagggagaggaaaataaagacctgcacatctgaccccaaggtgtcaggccggtttactggtaaccacctgagaagtagtttcagccacagaagaaacgaacacgtctgggggctgtgagttgccgggacgtggtggggactttcccctagagtggtctggcccccatctgagtcttaggctctgctgtaaaaaagaaacccaggttagcagtgccggtctgtgccagggctgtgggcagaggggatgatttctgagtggcaggggtgcaagggactttgtcctttctgtcaccacagagctgctcatacaacagtgggacatgacaacggtttggcttctcagctcagacacaccatgttataggggatcacaaacaagatggtgagtgcaccaagggctttgcagggactgtggcctggcggggtcagggctgggtgcctggtttctgttcacatttactcttggctgggccatccctgtcctcttcctcaggcagcgccccccctgtgagtttactcatacctcaggctggagacacaggtctttgtacacagtctccacgctgtggcagacttgtttgagctctgtctccaaatggctgatctttgccattttctgggtgaactcttggagcttttcctggatgatcttgttgtggtcattataaatctgatagatcctctcctctaatttctctgtcagatccgaaacctgttaaacaataagatgtgttctcggaaaatcaaacaagaggtatcacaagacatctgtgttaagtgggtttcttagatttctgcaatttatcttatgaaaatgacaaaataggctgggcacggtggctcatgcctgtaaccccagcactttggtaggccaaggtgggtggattacttgaggccaggagttcaagaccaacctggccaacatggtgaaaacccatctctattaaaaatataaaagctaggacgggtgtggtggctcacgcctgtaatcctaacactttgggaggccgaggcgggcggatcacgaggtcaggagatcgagaccactgtgaaaccccgtctctactaaaaatacaaaaaaatttagccgggcgaggtggcgggcgcctgtagtcccagctacttgggaggctgaggcaggagaatggcgtgaacccgggcggcggagcttgcagtgagctgagatcgcgccactgcactccagcctgggctacagagcaagactccatctcaaaataaataaataaataaataaataaataaataaataaatacacaaatacataaaaactaactgggcatggtggtgtgcacctgtaatcccagctactcgggaggctgagacaggagaattgcttgaacctgggaggtggaggttgcagtgaaccaagatgatgccattgcactctaacctgggcaacaagagcaaaactccgtctcaaaaaaaaaaaaattagcaaggcataggtgacgcgcacttgcagtcccagctactcggaaggctgaggcaggaggatcacttgagcccaggagttggaggctacagtgagtcatgatcacactactgcactccagcctgagagaccctacctcaaaagaagaaaagaaaaacaccaaaaactaaaacccagtgcagtgactgggggtcagattgcctatattttaaatttttttgctttttttgttttgttttcttgcggcggagtttcgctctcattgcccaagctggagttcaatggcatgatcttggctcactgcaacctccgcctcctgggttcaagcgattctcctgcctcagcctcccgagtagctgggattacaggcgagcgccaccacacccagctaactttttgtatttttagtagaaacggggtttcaccatgttagccaggctggtctccaactcctgacctcaggagatccccaccttcagcctcccaaagtgctgggattacaggcatgagccactgcacctggcctgttaaatttttttaagaggcaaaagtatatacagtcgtgtgctgcataatgacattttggtcaatgtcagactgtatatacaatgatggcccataagagtataatgccatatttttactgtaccttttctatgtttatatatatttagatacacaaatacttaccatcatgttataagtgcctacagtattcagtatggtaacatgctgtgtgcaggtttgtagcttaggagcaataggctcttccacgtagcctaggtgtgtagtagactataccatctaggtttgtgtaaattcaatctatgatgttcagatgatgacagtgtcacctagggatgcatgtcacaaaactgtacagtacaagctcagccaggttaggaagaaagtacacagaatagaagaggcatccaacaaagtggcctctgggtgctgtatcaaaataaataaataaataaataaatgtttttgtatcttttctactagaggccaaggcagcagggtgaggagttcaagaccagcctgggtaacatagcaagatcccatctctacaaaaaaaatgtttaaagaaaattagctgggcatggtggtgcacacctgtagtctcagctacttaagaggcagaggtgggaggatcatttgagcccaggagtttgaggctccagtgagctgtgatcgtgccactgctctgtaagcctgggcaacagagtgagacgccacctctaaaaatataaataaataaataaaacaagtgagccgggcatgatgttgcatgcctatagtctcaagctactcgagaggctgaggtgagaagattgcttgagcccaggagttcaagattgcagtgacctatgattccaccactgcactgcagtctgggcaacagcaaggcttgtctcaaaaaaaaagaaaaaggaaaataaagtcaatctgtcatcaagacacctagaaccagcaagctgtcccactcatgtgacccattatgtattttgtttgtttgtttgtttgctggaattataggcacgtgctaccatgcctggctaatttttttttttttttcgagacagccaagatcgtgccactctactccagcctgggctgggcaacagagcgagactctgtctcaaaaaaaaaaaaaaaagaaaaagaaaaaaccagaaagaggcagtcttctttttcttctttttttttttttttgagatgaagtcttgctctgtcacccaggctggaatgcagtggcgggatctctgctcactgcaagctccgcctcccgggttcaggccattctcctgcctcagcctcctgagtagctgggactacaggcgcccgccaccacgcccagctaattttttgtatttttagtagagacagggtttcatcatgttaaccaggatggtcttgatctcctgacctcgtgatctgcccgcctcggcctcccaaagtgctgggattacaggcctgagccaccacgcccggccctcttctttttttttttttgagacggagtctcacctgtcaccaggctggagtgcagtggtgcaatctcggctcactgcaacctccgcctcccaggttcaagcaattctgtctcatcctcccgagtagctgggactacaggcgcgcaccaccatgcccagctaatttttgtatttttcatagagacggggtttcaccatgttggccaggatggtctccatctcctgaccttgtgatccccctgcctcagcctcccaaagtgctgggattataggcgtgagccaccacacctggcccctatttatttatttttgagacgaaatcttgctctctagcccaggctgcagtgccgtgcagagccactgcactgagccaatttttttatttttagtagagacgtggtttcaccatgttggccaggctggtctcgaactcctggcctcaagtgatccacctgcctcggccttccaaagtgctgggattacaggcgtgagccactgtgcctggtccccccattatatattctgaagaggcatcaggtgcaaccattcatgtaggacctgaacatcacaccagcttttgcaagatgtaagccctgggcatgtggaagaagctccactcccccgtcacagaccattcgatggcttctgcaggacatatgggtgtgacaatgcaagttgtgcctcaaccccctactcccgtggctgctcgaccttgcgtgaagtaagagggctgcgtgttggaggcaggagggcatccaacgccccgctccctcagcctggctctctcgtcaggcaaatcattcatttccaagccttatctatatcatgggtccaatctcttctctgtaggactattctaagggtaaattgagatacagatggtcccaacttactacagttcaacttactacatttttgacttacagcattttcaactcacaatgggtttattgggacgtagccccatcataagtggaggagctcctgtgctgtgtgtgaatggcctagcaccgtgcctggtgtacaacagacaccatcagtggttcattccctccccttttgcataaggaatcccccctctcgctgggtggagtctgtcaccttggtcttcaggctgttcctgaagttggtcatgagtgcatggtccttttgccggctcttgttgatgttttcgatcagctcctgggctctcttctgcaggatgtcaatgcttgagtccagagaggagaagtagagtcccgacttcccttccaggaccgtcagctggcaactggcactggaggtggcgacacaagggcaagaaacctgacttctcagagtacaggaagcggccaggtgtagtcgctcatgcctgtaatctcagcactttgtaggccgaggtgggcggatcacaaggtcaggagttcgagaccagcctggcaacatggtgaaacctcgtctctagtaaaaacaaaaaaacaaaaaattagccaggcacggtggcacgtgcctgtagtcccagctacttgggaggctgaggcaggagaattgcttgaacccaggggatgaagttgcagtgagccgagatcacgccactgtactccagcctgggtgacagagcgagactccgtctaaaaaaaaaaaaaggacaggatgctgagatcagcaccagactcttccaagagcggctgatctgagagagatcaggtgggaggggacccgcgttgttgccttccatgggtgacacgaggcatgcttcctaggttattccattcacacacacgccctgaatgatgagaatggcacccccattttatagctgagaaaacagaccaagaggcacgactaaatatgcccaaggttccagaccaaggaggtctgtctgtccccaaagcccactgttattttatgacaccaacttgcttctttggaattttggaataccaataatagtgtcaatgctttctttcttttttttttgagacggagtctcactctgtcgcccaggctggagtgcagtggcgcgatctcggctcactgcaagctccacctcccgggttcatgccattctcctggctcagcctcctgagtagctgggactacaggcgcccgccaccacgtccagctaattttttgtatttttagtagagacggggtttcaccgtgttagccaggatggtctccatctcctgacctcgtgatccgcccgcctcagcctcccaaactgctgggattacaggcgtgagccaccgcgcccagcccaatgctttctttcttattttctttttttttatagagacaggtctttctctgttgcccaggctggagtgcagtggcacaatcatagctcactgcagtgtcagcttcaagtgatcctcccacctcagcctcctgaataggtgggactacaagcatgtgctaccatgcacagctaatttttaaaatttttaaatagagactgggcttcactatgttattcaggctgctctcaaacttctggcctcccaaaatgttgggattacaggcatgagccactgcgcctgactgatgcaatcagcaatctcctgcaacctctgtctcctaggttcaagccattcttctgcctcagcctcccgagtagctggaattacaggtgcacaccactacacccaggtaatttttgtgtttttagtagagacagggtttcaccatattggccaggctggtctcgaactcctgacaagtgatcctcctgcctcggcctccaaaagtgctgggattacaggcgtgagccactgcgcccagcctgatgctttcttaagtgaccttcctgtcattaacctgctgcatccctttcccaacctactgggtgatgttgaccgcctggggctacagtgtacctgcacctccttgctcccaccaggtgaggtgaatacctgttgaattatatttaaagagcatttaaagaaatgcgcacacacaaaaagttgttggtcccatgttgtacatgtaactgtaattatgtaattcaaatattgtgttaacaagtgaaatagtggcagaagagtgacagctatctaaaaagctaaacagaatgaaaaattttgagtaatatgtaatgttccgtaacttcataatattcaatgtaataaaatggaacttcagttgggtatgggagagagaactaaaattgaagcaaagatcataaaaatctagaaaaattctgcatatagattgctctgccaaggccttgttctctgctttaaaaacagaactggggccgggcgcggtggctcaagcctgtaatcccagtactttgggaggccgaggtgggtggatcacaagggcaggagttcgagaccagcctggccaacatggtgaaaccccatctctactaaaaacacaaaaaattagccaggcgcagtggcaggcgcctgtaatcccagctactcaggaggctgaggtacaagaatcgcttgaactcgggagccgagatcacaccactgcactctagcccgggcaacagagtaagacttcgtctcaaaaataaataaattaattaaattaaattaaaataaattaaaacaactgaaaattgtgggtaatgcattgtgaatgaagtttatggaaaaaatgtgatctgataaggcaacccattggtattttaaattaagatatattttttcttcttctgatgctctggtttatttgaccggtttgacgtctgatcagttagcggttctggccaggtagagctgcccctgtgagtcacagctaacttttcctcagccatgttcccggcactgagctaagtcacatgccttgtcttggtgcatcctcacgaccacactcgggtcatctgctgttctctttacgacatgggcttagagtggttacaccaccttctcaaggtggaggacagtctgtggcagagctgggctttgtacccagaaggcctgacttcccagctggtatcctgcttcctactaaggcactcaggcgccactcccctcctggatcttacatttcctcgtcgccctctgaggtcctccagctctgaaaggccaagccttgtaggtgtggacagagcagttcctgaatgcagcaggtcacacttgtgtccacaagcaggttactgattacttacaaaaataaatcttggccaggcacagtggctcacgcctgtaatcccagcattttgggaggccgaggcgggtagatcaccagagatcaggagttcgagatcagcctggccaacatggtgaaaccccgtctctactaaaaatacaaaaattacccaggcatggtggcatgtgtctgtaatcccagctactaggcggactgaggcaggaggatcgcttgaacctgggaggcagaggttgcagtgagctgagatcgtgccactgcactccagcctgggcaacagagcgagactccatctcaaaaatataaaataaaataaaaataaatctcagctatctcaaccaggcacagtgggctcacgcctgtaataccagcacttcggggggctaaggcaggtgaatcgtgagctcagggttttgagaccagcctgggcaacatggcaaaaccccatctctacaaaaaacacaaaaattagccgagtgtggtggtgtgtacttgtagtcccagctacttaggaggctgaggtgagaggatcacttgagcccgggaggtcaaggctgcagtaagcttgatcatgccactgcactggagcctagatgatatcacgccactgtactccagcctgggcgacagagtgagaccctgtttcaaacaaacaaacaaaacaaccacaacacacatatacacccctcccctctccacccggtctcccccagccggccacctccctctttcctccccatcaaggccaaggttctagaaggagctgcttaaattttctgggctttttttttttttttttttttaagagagagagagagtctcaccctgggcttcttttcttttcttttgagacagagtctcgctctgtcaccgaggctggagtgcactggcatgatctcagctcactgcaagctctgcctcccgggttcacgccattctctttcctcagcctcccgagtagctgggactacaggcgcccgccaccacgcccggctaattttttgtatttttagtagagacagggtttcaccgtgttagccaggatggtttccatctcgtgacctcatgatctgcccacctcagcctctcaaagtgctgggattacaggcgtgagccaccgcgcccggccatcctgggcttattttcttacccccattcacttttcagtccattgtaatcaggttcctcccccggttctcaaatgaaacagctcctaccacagtcaccatgaccttgtggttagaccgatagacatctcagagtgacatgctgacctcttggcagcagccagcactgctgaccacccttccctgctactcccgacatgtggtatcccagaggtctgtgcttgggcctctgctgtcttcttgccagacaccgtcaatcacacacttgttctgcagtgaggcctccatgcctcctccctgctggcccctgcagctaatatcccagccaccattccacaatgcacaggctattattctccaaaggcattcattcccgtagcatgggatccctgaacagtcccctttcccacctacgtcctgtctcctccagaaagtgttccttggctggattaggtgcacacagcacctacggtttcactgtttacaccttggcctcccactgtagtctgctgaagggccagggccatccttcatctttgtatcttcagtacttacccctcatgagagaagcaataaatgtgctgctaataagtaaatgacttgcgagtactatccattaccatccacactttggattctatcatctaaattctatcatcccagcccatgcctctctcctgaggacccaagaatatatgaaacctcccagcctccccacatggctgtctcaaaggcatctgaaactccacatttgcacaaccaaaagcgtcatctcccaggcaacccgatttcatcttccattcccttagttaatgacataaaaagccacctggttcccaagctcaaaacttagcagcaagcctagagtccagcttctctctgtccctctgcatcctgtctcaaaatcccctcatttctaccttctttgtttttttatttttatttttaattaatttttttttcagatggagtttcactcttattgcccaggctggagtgcaatggcgcgatctcggctcactgcaacctccgcctcccgggttcaagcgattctcttgcctcagcctcccgaatagctgggattacaggcatgtaccaccacacttggcgaattttgtatttttagtagagacggagtttctccatgttggtcaggctggtctcaaactcccgacctcaggtgatccgccctcctcggcctctcaaagtgctgggattacaggcatgaaccactgtgcccagcctttttatttatttgtttttgagacagagtcttgctttgttgcccaagctagagtgcagtggagcgatctcaggtcactgcaacctccaactcccggtttcaagcgattctcttgcctcggcctcccaagtagctgggattacaggcacctgccaccacacccagctaatttttgtatttttagtagagacggggtttcaacatcttggccaggctggtctccaactcctgacctcgtgatctacctgcctcagcctcccaaagtgctgggattacaggcgtgagccaccatgcccggccctaccttcttaatgtctctaaatctaccatcattagcagctctataactttcacttctcaactaggccatagggacctttattttatttacttatttatttttgtaaaaaattttgtaataaattttatgttaaaaaatttttttttcttttgtaagaaattttcttttgtaaaaaattttgttattattattttgtttttgagacagactctcactcggtcgctcaggctggagtgacaggctggagtgtcgctcaggctggagtggtgcaatctcagctcactgccacctccacctcctgggctcgagtcattctcgtgccccagcctcctgagtagctgggactacaggcacacaccaccacgcccggctaatttttgtatttttagtagagacagggtctcaccatgttggccaggctggtctcaaactcctgacctcaagtgatccgcctgcttcggcctcccaaagtgctgggattataggcatgagccaccacgcctgaccttttatatatatatattttttttgagatggagtctcgctctgtcccccaggctggagtgcagtggcacaatctcggctcactgcaagctctgcctcccgggttcatgccattctcctgcctcagcctcccgagtagctgggactacaggcgcccgccaccacacctggctaattttttgtatttttagtagaggcggggtttcaccatgttagccaggatggtctcaatctgctgacctcatgatccgcccgtctcggcctcccaaagtgctgggattacaggcgtgagccaccgcacccggcctgacctttttttttcttttgaaggcagggtttgctacattgccaagctggagtacatcagtacaattactgcaactttgaactcccccaggctcaagtgatcctctcgtctctgcctcctgaatatctaggactacaggcgggtaccactactcctggctaaattttgtttaatttttctgtatagatggaggtcttgctatgttacccaagctggtctcaaactcctggcctcaaaaaatcctgcctcggcccccaaagtgctgagattacaaacgtgagccacagtgtcagcccctagtgacattctacactgtaatctgatttcctactcctgtttgttagcctaaaaccatccccaccagccacaagatcaagtctaaattccttcacacagcatacaaggccttccagggccctggcctccaccctctcttccagccttaatgggtttttttctttttctttcttttttcttttttgagaaggggtctcactctgtcgcccaggctggagtgcagtggcatgatcttggctcactgcagcctccacctcctgggttcaagcaattctcccacctcagcctcccctgtagctgggattacaggtgcctaccaaccatgcctggataatttttgcctttttttttttttttttttttagacgaggtctcgctcagctgcccaggatggagtgcagtgccacgatctcggctcactgcaaccactatctcccaggttcaagtgattttcccatctcagcctcctgagtagctgggattacaggcacctgccatcatgcccagctaatttttgtatttttagtagagatagggtttcaccatgttggccaggctggtcttgaactcctgaccttaggtgatccacctgccttggcctcccaaattgctgggattacaggcgtgagccaccgtgcccagtgcagccttactgttttctttttgtttgtttgtttttttcaagacagagtcttgctctgtcacctaggctggagtgcagtggcacgatctcggctcactgcaacctctgcctcccgggttcaagcaattctcctgcctcagcttcccaagtagctaggattacaggtgcccaccactgcacccagctaacttttgtatttttagtagagacagggtttcaccatgttagccaggctggtctcgaactcctgacctcgtgatctgcccgccttggcctcccaaagtgctgggattacaggcgtgagccaccaagcccgatctagccttactgttttctacagcccctccatctgcagcaattggggacctaccacaatttccccaaacatgtcagcctttgcctggaatgactttcccttcctgcctccttcataatggaacatttggaacttttgcttctctaccccccgctatacctaggccttgctggtcacaaagctgccaaagtttatgaacatcagtcccctccagcgcacgacaccttgagggtgcagactacaccctactcatttgttttgcagcaccccaaaggtttcatcagtttgctgaatatctaaatgaatgcagcactgacattggggctcccacacctcctcgtacccagttcaccttgttgtctcagcctctcctggatgctctcaacagtttcagaccctaaaattaaaatcgatgagagcaccaggtgtttctttttgtgtgattgttcacaacctgcttgagctgctaatggttcagagctgctcctttttaaggctcaagggatgaggctggaaccggttttcatggcagctaagcaaacagtaaaaaaaaaaaaaaatcacttgaattcagctaattcgagtttcatggtaggacaaaggcctgcatcagatgtctgctgagagcttctttatttttccaacctctcctttggggatttatcccttttgatttcatttttcttaatacacagcagctgcatattaatcaggatgctaatgaatcataggcttccctgggcctgcattcaccaattaactttaacaaacaaaatgcgtggtgtcctctctgctggctttcccggttcctaggctggcttctgttgccgaaccctggaccgaggccagagaatgcaagtcagcccaacacagcacgtcgggtgtgcatggcctgcgcccggattgggcagcgggctgggggctgtgaacacagcgctgcgttcatctattatggtctgtccttctaagaagtccctaatttggctgcgaggattaggacatagttcccaagcagggcccacgctggcagggggcccaggagctgcggaggaaatgggtctaagcgaagagaccatctgttcgctccaggtaaagctgtgattggcaggcgactgagccagaactgcccgctggtggggccctccctccgtggcctctaacagatatacaagtaaacaatccgccagccacttatgaccaccgagggtggcagtcccgggagaggaggcaagctaatcaaacattcaaggggggaacacaacagaatctctggcgcttgggcaaaacaatgttttgctgaagtacagccaggaagggggaaggtttgaatggaagctgatgagccagttcctcaacctctccttttctctctggaaacgtgttaacattttaatcatgttgctgagtatctgctgctggatctattaactggcccctgcactggttttaatctatctgttttttggcccagggttcctgtggagctccttgaagtctctaaatgatttgcagcggtctgtgtctcttcactacacagatcctggtctaaacatgctattccgcagtaaggtattagcaaacaaacgacttcaaccattgcttccctttttttttggtctccaattgacagcacacacctataaaccatttcacgcgtggcctgctttccagcagaggaatgtgcgaggagagggaagctggcttgctttctgcctagagtcctcagggccctgtcctgaccctcctctcactccttctccaggtgagctcattcattccacagctgctgctgaaacaatgactcccacagaaccatctccagaccctcaccccaccccgagttccgggtcagaaagttgaactgtatcctggacatgtggatgtccctggccaccgaaagtggctcagataaacaaggacaacacagaactcatgttcttgtctctgccagagaagccaccacctaccggaaaccaccacaagctggaaagcagacagcagtgatgtgcttgtaagcatttagcaactggctgtgtgatgggggggaagccctgattcgtagtgtttgccaatttccgtggtgcagagcctcccaccattagccaatttcaggctaccaacatgaagacgctaaatgccaagttgggaagagatgtgtagaattggctctttcaagccggtaggagctggccccagtacatcatggccgggaaacatcctccctcatccccttcctgtgtcttatggcacaaggcacttcctccatctgccctgctaaaggccaccccccccacaccccccataaaagcctcccactagacctccctacacccacacattctccctcccaaccattctctacaaagcagccatatttttttattaatattttttgagacagggttttgttcttgttgcctaggctggagtgcaatggtgcaatcttggctcagtgcaacctctgcctcccaggttcaagcgattctcctgcctaaccctcccaagtagctgggattacaggcatgcaccaccacccctggctaattttgtatttttagtagagacggggttttgccatgttggccaggctggtcttgaactcctgacctcaggtgatccatctacctcgaactcccaaagtgctgggattacaggcatgagccatcgtgcccggcctgcagccgtatctttttataacgggaacctgagcatgtcacttctgtgacccagcagttcccctcctaggtatgagtatgcccagaagaaatgaaatcatctgtccacacacaaacttttctaaatggatttcatagcagtgctgctcataatagccaaaaagtgaaaaccacccgaatgactatcaacagatgagtggataaacaaaatgtggtagactcatgtggaatattattcagccattgaaaagatgaagtccagatgcagtggctcacgcctgtaatcccagcattttgggaggccactgtatctggcctggagtgatgaagctgttttaaagttgactatgagaatggttgtccagctctgaatataccaaaagcaatcaaatcatacccttcaaggaggtgagccgggcgcggtggctcacgcctataatctcagcactttgggaggccgaggcgggcggatcatgaggtcaggagattgagaccatcctggctaacacggtgaaaccccgtctctaccaaaaatatataaaaaaaaagccaggcctggtggcacatgcttgtagtcccagctactcgggaggctaaggcaggagaattgcttgaatctgggagggggaggttgcagtgagccaagatcatgccccctcactccagcctgggcaacagagcgagactccatctcaaaaaaaaaaaaaaaaaaggtgaaccgtatgctatgggaattatatctcaaagctgttactgaaaaaacctctaggataaagtctgtagcccacaaaatgcctcataacctggccccttctgcagccctccccttgcactcacccctgtaccccactcgctcgcctagccacactggccttcctttagctcccccgaatgccacgagcagggacttcgcacgagctcttctctcaacccctccttccccaccctgcccacactttctgcttcaacatctcttctacaaggacaccttccctggctccccattccaggctggctgcccacaggggaaaggtctcccagcaccatgatctcttccctgttggtgtttggtcagatgcaaacagcaggagggtatgagcatgtctgtctggaggacaggagtgtccctgctgccaatcacaatactgccatatcagcctttttttttttttttttcctcgagacagggtctcactctgtcacccaggatggagtgcaatggtgctatcttggctcactgcaacctctgcctcccaggttcaagcaattctcctgcctcaggctccggagtagctgggattaaaggcatgcgccaccacgcctggctaattttttgtatttttagtagaaacagggtttcactatgttggccaggctggtctcgaactcctgacctcgtgatccgcctgcctcggcctcccaaagtcctaggattacaggttgagccactgcgcccggccaacatgagcctccttcttgctcttttgagaacacatcaagcttattcctacctgagggacttcatacttgcggccccctctgcgtggaaggtttgggcccagaatgcctcctggctggcctcttctcatgtgacctcttcagagttctccaactgctctaaggtccctgtcactctacttgctccttactatattttgtttcttcattccacttacttgccaccagttgaaatcacattattcacttatttatttttgagacagggtcttgctcttccagtgcagtgaagcaatcacgtctcactgcagcctcgacctcccaggctcaagtggtcctcccacctcagccttccaagtagctagggccacaggtgtgtgcaaccgcaccacaccacgctcatttctttctttctttctttcttttttttcagagagatatgtctccctctgttgcccaggctggtctcaaactcctgggctcaagggatcctcctgccttggcctcctgaatagccaggactacatgcatgcaccaccacgcctggctgatttttgtgtttttagtagagacggagtttcaccatgtgggccaggctggtctcgaaatcctgacctcaagttatctgccagcgccagcctcccaaagtgctgggattacaggcgtgagccactgcgcccagcctctactatatatatactttttttttttttttttgagacagagtcttgctctgtcaccaaggctggaatgcaatggcacaatcttggcttactgcaatctctgcctcccaggttaaagcaattctcctgcctcagccttctgagtagctgggattacaagtgtctgtcaccatgcctggctaatttttgtagacacagggtttcaccatattggccaggctagtctcaaactcctgacctcatgatctgcctgccttggcctcccaaagtgctgggattacaggcgtaagccaccgtgcccggcctactaaatttttcttttttcttttttttgagacggagtctcactctgtcaccaggctggcatgcagtggcatgatctcggctcactacaacctctgcctctggggttcaagcgattctcctgccttagcctcccgagtagctgggactacaggcgtgcaccacaacacccagctaacttctgtatttttagtagagacggggtttcatcatgttagccaggatggtctccatctcttgaccttttgatccacccccctcggcctcccaaagtgctaggattacaggcataagccaccattcctggctttttttttttttttttgagacagcgtttcggtctttttgcccaggctggagtgcaatggcgccatctcagctcactgcaacctccacctcctgggttcaagcgattctcctgcctcagcctcctgagtagctgggattacaggcatgtgccactatgcccagctaattttgtatttttagtagagacggggtttctccatgtttgtcaggctggtctcaaactcccgaccttaggtgatccacccgccttggcctcccaaagtgttgggattacaggtgtgaaccactgcacctggccaatattttttaataaattggcccgacattctggcccgcctctagtcccagccatttcggaggctgaggtgggaggatcacttgagtctgggaggtggaggttgcagtgagccgtgatcatgccactgcgtggtgacaaagcaagacgctgtgttaggagggaaaaaaaaagcagcagacactggcatagccttgtggaagaaaagggtgaatgagagggacccaggggcctgtgtagacccatagggctgggatcttcctcacctagctggccctccaccagcttcctcctcgcagttctcttcccaccgcggatgctccttgctctcccccaagggctgcggttcctggtctttgcatttcacatggggcacgtccacctgcaagcacagtcaggacggaggccaaggagggaggatgaggagtgaacagatcgccctcctgccgacccttcaaccctggtcacctcgatgtgctgctgcgggacggtggggacccgcaggaaagacgggcagggctggggcaggtgccatgagggcaggggcatggggtgaaaggacactctgtccctaggggacaccaggacaccagacctagaggggccgggtgagggcagggctgtgggaatgtaactggaggacctgggctcctaactggtatgtgtgttggctggagtccttcgagaaaggagaagaggtaggagaaaagagatgaggccgggcgcggtggctcacgcctgtaatcccagcactttgggaggcggaggcgggcggatcacgaggtcaggagtgcgagaacagcctgagcaatatggtgaaaccccgtctctactaaaaatacaaaaattagctgacgtggtggtgcgtgcctgtaatcccagctactcgggaggctgaggaaggagaatcacttgaacccgggaggcagaggttgcagtgagccgagatcacgccactgcactccagactgggcgacagagtgatacttcgtctcaaaaaaaaaaaaaaaaagaaatgaaagaaacgggtgcggtgcgtgggtgtttgtgcctttctctactccgttccggccacgcgccatgtgtggaaatcagacccgtcagtgcgtcagtcagggccgggttcagtcagtcaggaaatttgaggccaggcctgatgagagggagccccaatggcaaaggacaagcggccgggctcgggtccgctggagatggctgggatcgcagccgttccctgcctatctgtccgcccgccccacgcgcgagaaggaaacaagcgccgcgtactccctgtcgctccattccgtattttcccgccttcaagctcgcaccctctgcgcatgcgccgaccccgcccctggccagctgcgctcccgcggacgagtgtgttgtgacgcgtgctcccggccccgccctctttgagaacttgcgcggccaactgggcggggccgaccgttaagcagcagtttcgcggtccgcgggctgcgcgcgcagtcggcgccccttgggagcaggacggcgcgctctgggtgcgcttgtgtgcccctgtgaggctcctgggttccacggggcgcccaggttatacggatctcagagtcctgtatttattcggtgcttctaacttcatccactctgccttggaaaatatactccataacaatttttttttttttttgagacaagatcttggtctgtcgcccaggctggagtgcagtggtgcgatcacagctcactgtagcctcgacctcccaggttcaagcgatcctcctgcctcggcctcctgagtagcagtgtcattcaccaggcccttctaatttaaaaatatttttctggccgggcgcggtggctcacgcctgtaatcccagcactttgggaggccgaggcgggtggatcacctgaggtcatgagttcgagaccagcctagccaacatggtgaaactgtctctactaaaaatacaaaaaatagccgggcgtggtggcgggcgcctatagtcccagctactcgggaggctggggcaggagaattgcttaaacccaggacgcagaggttgcagtgagctgagatcatgccactgcactccagccggggtgacagagtaaagctccgtctcaaaaaaaaaaaaaagattgtatgtatatatacacacacacacacacacacacacacacataattatatttttttttcctgtagaaatgagatctcactgtgctgagcccaggctgatccccaactcctgggctcaagccgtcctcccgtcttggtctcccaaagtgctgtctcaaaaaaagaagaaattatctgatctaccctattgactgtaggtcataagacccccgtttcaaagaagtttctgccccacacaaggcctatctatctagattcttcttggcctctctgagcatgcattcctgagactccaagaagaatctagacagataggccttgctgggtttccccactcagcctattagtattagacgacccccccggctttttttttttttttttttttttgtcttgctctgttgtccaggcaacactggagtgcagtggcaagatctcaactcgctgcaaccttggcctcccaggttcaagcgattctcagccaaccaagtagctgggattacagatgcaccatgcccagctaatttttgtatttttagtagagatggggtttttccatgttgctcaggctggtctcaaactcctggcctcaagtgatccacccgcctcagcctcccaaagtgtcaggattacaagtatgaaccacgacaaaccctttttgtccaatcaaatttctacctgggtgttcaaactttgctgaacctaagcataagacacttttcattaatcaggcatggtggcgggcacctgtaatcccagctgcttgggaagctgaggctgctgtgagccaagatcgcccctacactccagcccagggaacagagccagactccgtctcaaaacaaaacaaaacaaaaacacagtttcccctgtatctctggatcttcattctgaaggcttgtcaggtaacactatgatcaaatacattcgtattccttttctcttattaatctgccttttctcagtaatttttagtgaaacttcagagggcaataaggaagctttctcttcacccctacacagccaaagttcagatttgatggaaatggcaagattccagggtacttgtgtttatttagacacataaatatgtatttaacgacagggtctcactctgttgcccaggctggagtgcagtggtgtaatcacggctcattgcagcctcgacctcccaggctcaagtgatcaacctcagtctctggagtacctgggattacaggcatgagccactatgctgagctaatttttgttttctgtttttgggggacaggtctcactctgtggcccagactggagtgcagtggtgtgatctcagctccctacaacctccacctcctgggttcaagtgattctcccacctcagcctcccagatagctgggactacaggtgcctgccatcatgcctgctaatttttgttttttgtttttttttttggaacagagtcttcttctgtcacccaggctgtagtgcagtggcacaatcttggctcactgcaacctccacctcctggttcaaacgattctcgtgcctcagcctcccgggtagctgggactacaggtgctcaccaccacgcccagctttttttttgtatttttagtagagacgggttttcaccacgttggccaggctgctctcgaactcctgacctcaagtgatctgcctgcctcagcttcccaaagtgttggaattacaggcgtgagccaccacgcccagcctaatttttttttttttttttttgagacggagtcttgctctattgcccaggctggagtgcagtggtgcgatctccgctcactgcaagctccgcctcccaggttcacaccattctcctgcctcagcctcctgagtagctgggactacaggcacccgccaccacgcccggctaattttttgtatttttagtagacagggtttcaccatgttggccaggatggtctcaatctcttgacctcatgatccacacgcctcagcctcccaaagtgctgggattacaggcatgagccaccgcacccagccctaatttttttatttttagtagagatggggtttcaccacgttggccaggctgctcctgaattcctgacctcaagtgacccacccaccttggcctcccaaaagttctgggattacagaagtgagccactgtgcctggctcagtacccatactttttttttttttttttgtatttttagtagagacggggtttcaccctgttagccaggatggtctcgatcgcctggcctcgtgacccgcccgcctcagcctcccaaagtgctgcgattacagacgcgggccacctcgcccagcccagtacccagaattttgaccatcaagtggcacactgagctagggggacccaacaagacccctcacccctaaggaaagccaccagatgggggcaactgcccactttattagacaataggtggcccacaggtctcctcagggcccaccctcacagtagacacaccacacaggacaacagaaggaacctgctacccagtcctctgtccctgggattctggtcctgggacaggtgggaaagaggaaggtgggggctggcctcacagaggcctcataaatacaaggtcactggccagggatgcaaaggagcgcagcagcagggactcggggaggatgacctgtcctagagtggcccatgtcacgcagcctcctgtgtgggagggggcctcggctcggcatccaggcggcacaggggactgtcatacaccatctgcaggttcaccttgtggcccaccagctcccggatattgttgatgccatatttgatcatcgttgggcttgtgggggagggaacagagtttatcatgaggtcagcacgtgcacccttctgctcagatttccatggctcccatcttcttcagaggaaaagttcaagttctccccatgacccacagggccctgcgccaactgctctatcacctctcaccctccgccttcagccacaccagcctcctcactcttctcctaatacaaaaagcacattcccacctctgggcctttgaactgactgtgaccactacctgggacacccttccccagatactctcatggtttacctctttatctacctctagattttgcttaggtggcacttcttcctccatgatgccttcactgaccacgtagttgccttagccctccctataccacttactgccctggtacacacttctgtcttcttttgctgagtgcatttgtttttttgaaacagagtctcactctgtaacctagggtggagtgcagtggcgtaatctcagctcactgcaacctccgcctcccaggttcaagtgattctcatacctcagcctcctgagtacctaggactaggactacagacgcacgcaacagtgcctggctaatttttgtagttttagtagagacgggagacagagtcacactctgttgtctagactagaatagagtgcagtggcatgatcttggctcactgcaacctctgcctcctgggttcaaacgattctcctgcctcagcctcctaagtagctgggattacaggcacctgctaccacgccaggctaatttttatatttttagtagagatgaggtttcgccatgttggccaggctggcctcgaactcctgtcctcaggtgatgcacctgcttcagccacccacagtgcttggattacaggcatgtgccaccacgcctggcctgtttttattctttgtagaggcggagacttgctctattgcccaggctgatctcaaactcctggctcaggcgatcctcctgccttggcctcccacagcactgggatgacaggcatgagctaccacgcctggcctgatgtacttgttggtcttgctagttatcatccttctcgctccactgggaccccagattcagagggagggacataagctgtcatgttcacagcacggggctgagcattcagtttgtactcacgatgaaagttttgtccattggatgaatgaatgggtggtgctgaaaccacgcaggcccctatacctggagagttatttgaggcagctggacaccccgagtttccacttgggcacttaccgctccagggagaggccccaggcaatgaccgacacgttctcgggaagccccatgggcagcagcatctctggacggaagacccccgagtttccgacctccacccacttcttcaggcctgcagaggcaggacagaaaagacgggcagtgcgtgttgagtttctgggcactgctggtacaggttctgggtctaggtggtgagcttgggaggtggggtacaggcatggcaatggggggacccaggccaaaccatagtagcctgagacctccctcccaccccagtaccagggcctaccctgaccttggtggtagctgaacacctccatgctgggctctgtgtatgggttgtaggctggcttgaagcggagttgcgtgatacctgcaggaagtggggggcgggcaggagagcaggggtttggaggataatgctggtgatcaacacacctgcccgctgcctcaccaccatggcccacccctgcccccctgctcacccagcttggtgaagaactcccgcagaacgcccatgaggtggcccaaggtgagaccatgatccgccaccacgccctcgatctggtggaactcagccaggtgcgtggcgtccagggtctcattccggaatacgcggtcgatggagaagtacttgaccggagtgaagggcttctaggggtgacaaccgagccaggcccaggtatgggtcagaaggtccctttgacagcaccctctccccactggggcccccgcctgggccaaccgcaccttctgggcaaggcggtagagcgcacgggcgctggctgatgtggtgtgggttcgcagtaggtttttccgggcctcgtccagcttccagttatacttgtaccttcaggagggaaggtgggaagtccatgcaatggcccaggggtccccagcctccttcccttccataccaggtaagtcctgcctcacccctgtgagccgtagccgccctgagagtgggtccgcttgacccgctggacatagtccattgggagctgcagggcctccgctggatctgggcaggacagagcaacatcaggtcagtcaacgagcatttcccacccctttttttttttcagacagggtctcactgttgtccaggctggagtgcggtggtgcaatctgggcttactgcaacctctgcctcccaggttcaagtgattctcgtgcctcagttttctcatttgtgtgtggcttttttgggttctttttttttgagacagagtcttgttcagttggcccagctgaagtacaatggctcaatcttggctcactgcaacctccacctcccaagttcaagcaattctcctgattcagcctcccaagtagctgggattacaggtgcctgccaccacacccgggaaatttttgtatttttagtagagatggggtttcgccatgttggtcagggtggtctcgaactcctgatctcaggtgatccacccacctcggcctcccagtgttgggattacaggcatgagccactgcacctgggctttatttatgtatgtacgtatgtatgtatgtattttgagatggagtcttgctctgttgcccaggctggagtgcagtggcatgatcttggctcactgcaacctcctcctcccaggttcaagcaattctcctgcctcagcctcccaagtagctgggattacagaagtgcaccaccacacacagctaattttttatatttggtagacgtggggtttcaccatgttggccaggctggtctcgaactcctgacttcaagtgatccgcctgcctgggcctcccaaagtgctgggatcatgccaccgcgcccgacctttttattttttctttttttttgagacggagtctcgctctgtcgcccaggctggagtgcagtggcgcgatctcggctcactgcaacctctgcctcccaggttcgagtgattctcctgcctcagcctcctgaatagatgggactacaggcacacgccaccatgcccagctaatttttgtatttttagtagagatgggatttcaccatgttggccaggatggtctcgatccacccaccgtggcctcccaaagtgctggaattacaggcgtgagccaccgcgcccggcctattttttttttttaaagggacaaaattttttttttttttagacggagtctcgctcagtcacccaggctggagtgcagtggcatgatctcggctaactgccagctccgcctccagggttcacaccattctcctgcctcagcctcccgagtagctgggactacaggcgcccgccactatgcctggctaattgtttttgtatttttggtagagacggggtttcactgtgttatccaggatggtcttgatctcctgacctcgcgatccgcccgtctcagcctcccaaagtgctgggattacaggcgtgagccaccgcgcccggcctaaagagacaaagtcttgctctgttgcttggcctgcagtgcagtgatgcaatcatagctcactgcagcctcaaactcccaggctcaagcaatccttcacctcagcctcccgagtagctgcaactacaggcgtgcactactatgcccagctaattttatttgtacagatgggtctttctatgttgcttaggctgttctcaaactcctgggctcaagcgatcctcctcccttgccctcccaaacagtgggattatacccactgaggctggccaagtttccttctttgtaaaaaggggtaacagtactgcttccagtagttggcaggaagattagaatagtggctagtatgtgatgagtgcttagtaagttttgggtgctatgacaataatgacaagaatgatgttgctcctctggccaggtaagccggcacccaatgacctcaactgccctcttggtcaggaaggccaccccattgtgggaagtcattccatttcagacagtgctaagggcaatgaaagaaagaaatgggacagaagaatgaacactaggggagaagggcttctgtagaactcggggtgagcccgggagtgttaggctggcctgtctctggtgacacgtgagcagagatttgaggctgcagcctgccttgaagatctgggagaaaacagctcttggctaaagacggaacataagcaaaggccctgaggtgtgcacggcctggaatgcccaaagaagacatgggggcaggcagggtgtgggggctcatgcctgtaatcccagcactttgggaggctgaggcaaaactgtttgagatcaggagtttgagaccagcctgggcaacatagtgagaacaaaacaaaacaaaaattcattaattttgggctaggcgtggtgctcacgcctgtaatcctagcactttgggaggctgaggcgggagtatcacttgaggtcaggagttccagaccagcctggccaacatggcaaaccccatctctattaaaaacacaaaaattagccgagcgtggtggcgggtgcctgtaatcccagctactcaggaggctgaggcaggagaatcgcttgaacccaggaggtggaaattgcagtgagctgagatcgtgccactgcactctagcttgggcgacagaatgagactgtctcaaaaaaaaaaaaaaaaaaaaaaaaaagccaggtgcggtggctcacgcctgtaatcccagcactttgggaggccgaggcagactggagtttgagaccaccctggccaacatggcaaaactccatctctactaaaaatacaaaaattagctgggcatggtggtatgcacctgtaatcccagctactcgggaggctgaggcaggagaatcgcttgaacctgggaggcaaagtttgcagcgagccaagatcatgccactgcacactccagcttgggcgacagagtgagaccctgtctcaaaaaaaaaaaaaaaaaaaaaaaagactgcaggtggcataatgagaacagagcttgacacatccaacaaggatggactttaatttaactcaattaatttttttagaggtagattcttccctatgttgcctgagctggatttgaactcctgggctcatgcaatcctcctgccttggcctcccaaatagccggactacaggtgcacaccaccatgcccagttctagacctaatttgatcaaatgggatgcccatcctgtaaaggctccgccgtggcctggtgtctctcatgtctcagggaggccctaggggctgacccacctcgaaggaagaaggtgtcgtgctggtcacgggctgggtgctgctggggctggaagagggcgtcaaagttccagaaggagctctcaatgaagttatcagtcggcatctcggtgaacctggtgggagacacagcctgactgccctgcctgtacccagcagaagcaccaggcaccgcccccagccctgtgctcaccccatctccaggaagatctgtcggaactgggagcggaccttgagcagcgggtgaaggtggccgctgtcggggaggacaccgtgggccaagaagttgtagggcttgaagggccggtcccgccaagagccactgggggaggatgcaagggcctggtaagggctgcccgcccctgccccctgccccagctcccacctgccctgaccctggggttgcctgctacctggagatcatctctgggctcagctctgtctcttgcttggagatgctggtactaaaggcactgcctttgctcacccagtaggtcttcagagtcctgtggccaggggaaggaaggggacgccactgccatctcctcctagaggacttccttgatctcccgtctgatgaggatccccatgctacctaccaagtcactctgctttatttccatcctgacatttatcactacctgaaatcctcctatgtgaccatgctgtatctccctgtattcactcactgattcattcaacacttactgagaacctaatgtgtgccagggtctgttcaaggtgctaagtacacgactgagtgatgatactagggaaagtctagcagatttattctgtgccaggctctgttctgcaaaagtctccccacaagccccggaaagagggcagttttttttatttgtttgtttgttttccttttttgagacagagttttgctcttgttgcctaggctagagtgcaatggcacggtctcagctcactgcatcctccacctcccagattcaagcgattctcctgcctcagcctccagagtagctgggattacaggcacccgccaccacacccggctaagttttgtattttcagtaaagacgaggtttcaccatgttggccaggctggtctcgaactcctgacctcaggtgatttgcccgcctcggcctcccaaagtgctgggattacaggcatgagccatcgtgcctggcccctttttctttgagatgggggtctctctatgttgcccaggctggccttgaattcatggattcaagtgatcctaacacttcagcctcctgagtagctgggattacacacgtgagccacacacttggcccaggctattttatagataaggaaacggagaccagcaaaggccaggtgacttggccaaggtcataaaactagttaagtgacagagcccgaacttcagttaggcatcccagctctagtctcttctctctgccactctgtgtctgctcaaaggggacatttgtcctgtgagaggacggcccctagcccatctaggttccagaggcctgtctggtgtgtgttcattaaactttggaccacactaaggacagtgaaagaaatgaacaagcaccaaagatgaagactaggggcgatgggcttcatggaactcaaggggagaggagggctgtcagggtggcctctttaaggggacacaggagagagacttgatgaggagcctatcttgaagatcagagggaaaacagttctcagcagaagggtcctcatgggcaaagaccccaaggcacgtaggcttgacaactatggcattaagcgagctgggaggaaactggccacacctgtgcttggtgtgggcaagatgtctccctcccaccatgcctccaccatgcttcgcaggtggtgggggcctgagcctgcagggggcacccactcacacttcagccaacagcttcctcttcctcagctcgctcctctccttctcccccagcttctcagcctgtcccccccggaccagctggagccgccgctgcacctcatcctccatgctgtccacctgccaggataaggagtgtgaggggtatgagggccaggggcccatgtgcccgtccacctgccccctgaccagcccgcaggaacgcaccactcggaacacccggggcccgtcagccgcactcttgtccacccgaatccacttgttggacatggccttgctgaagcccactttgccactgggcagtcgctggaaaagagaggctgcagtgagtggggcacgagggccaccttcatcccatcactcactccccattcaccccgcagctcctaccataagctcgctctgggccaggccctctgggggaatgcttcgaaacacacgggcctcatggctgccctcccgggcaatctcctcgccctccgcagtaagctcccagtgcttggtggaccgaagttcagcctcgatgacctagagggaaatgtggggagggtgtccaggcaggggtgaggctcagagccaggcaccccctttctgcagcgctgggtcccaggttgaaagcacagcccttaaagctaggttcacatcccagctatacaactttacagccaagtggtctcaagggaaagacttccccttgctgtgtctccatttcccttatgtaacacaggggtagtaataatgatagtttacacctcccagggtaaagtacaccactaaagatgttacctggcagaagacaaattctgtcggttttgaacctgtgacagattttaatgtgaaaaattaggtgaactgatatgtctccacatttttttgtttgtttttgttttctttgaaagggggtctcaccctgtcactaggctgggtgcagtggtgtgatcatagctcactgcagcctagacctcctgggctcaagcgatccttccgccagtcccgagtagctgggactacaggcatgtgccgccacacctggttaatttttaaattactttttttttttgagacggagtcttgcactgtcgctcaggctagagtgcaatggtgcgatctcggttcactgcaacctctgcctcccgggttcaaatgattctcctgcctcagcctcccgagtagctcggattacaggtgcccaccaccacccccagctaatttttgtatttttagtagagatggggtttcaccatgttggccaggctggtctcaaactcctgacctcgtaatcggccgactccgcctcccaaagtgctaggattacaggcgtgagccgccgtgcccggccctttaaattactttttaaagacagggtgttgttatgttgtccaggctggtctcaaactcctggcctcaagtgattctccttcctcagcctcccaaagtgctggcataatgggcatgagccaccatacccagcctgtctccatgtttaaatgttcacatgtcagtgcccagaatgtcagagacgggccctggaggtccacattacaaacaaaaactgaggttccaggtccagagtcatgaagacaaggacaacaagggtaagtagagtgcacagggcctggctcccacttcattctaatcccaactctgcccttcacttactgtgtgacctcaggaaagttgcttaacctctcagtgactcttctcatccataagagaaaggtgtgatgggttctacctcagatgattttaaggagtagctaaattaatactcagaaagaatatatagtgcctaccacgtgacaaacactgcataaattttttttttttttttttttgagacggagtctcgctctgtcgcccaggctggagtgcgatctcggctcactgcaacctccacctcccgattcaaacaattctctgcctcagcctcccaagtagctgggattacgggtgcccaccaacacgcctggctaatttttttttgtatttttagtagagacagggtttcatcatcttggccaggctggtcttgaactcctgacctcgtgatccacccgccttggtctcccaaagtgctgggattacaggtgtgaccactgcacccggcataaattctaattactataattatttttatggctattactgtcattagattgaacctcacctccttatattatttaaccctctgtgacgtatacaaatgtcagatcatattggtcaaggcactgtcaccccacacaacacagctgccatctctcctctgcattgaggactatgggctctgcagcctgagtgcctaatttcaaatctgggctcatcggcctcttctattcacactgattatgttactgaccatcagttgtcacatctgcaaaatgggaataacatggccatcagccaggattatggaatggattggacaaacaagctgagaccaaagtggggcacagaacatgagctctacggataaacagcccagatcctggccccatggatctagccttctgggtggcccacgggcccctcagcatcctacgcctgtgactctgtcactgtccacttgcccaagtcagaaggctggacttcatctgtgcgccccctgccttgtcctgaatcccacgccttccccacctcccccaagcttccttcccatagccagacatcatgccctccagcttggggaagtgccagcttcttctttcatcccttcacctccagtcctgtccatgccaattcttcccaaaggtgatgtggatagcacactcatctgaccggctctagctcctgctatcgcttcccagttccctcatgaggtaaagacctaagaggctttgcaattacagctatgctggtctcccttgccgcctgccatcccccaagatcccggccactgatctctaaagtgctatcactttcctcaacagagaacagactcagccgtcacctgcaccaggccgctctccctgacccccaaggctgggtcagctgtcacagctgggtcccctgttttcccccatcactctggttcttgaagcaccttcctattacgtcgcaacctgcgtgagggcagcaaccgcgacttcctcgtccatcatcgtaccctctacccacgctgaccgtgcctcaataaacgtttattgcatgaggaacatccgtgcgtctgggccctcactcgtcccacttcccgcccgcacatcccggagtggacacatatacagctaccccaaactaggcctgagggaatttggcttggacgtagagcgcccgtggcaaggggactgtaggtgcaagggcaaggcggtccggcatcacgggcccggctcacctcgcccagcgcctgaaggctcttcacggcgcccaccaccgcctggtgctccatgcccagctcagccgccaactcggcgctgtccaggccgccatcagacgcctccagccgccggagcagcagttccgccacctgaccatccgccatgactccttccagtgtgctcagcgtgtccgggcccgggtgggcggggggagctgagccaccggaaccggaaccggagtgtgtaccgccatcttgaatgtgtctaactgtagaacagggctcaatgtgtcgtcatcttgagtgtggcgacggagccgcaaaaggtgcatgggactcagttcccacctccaccctggctccatcaatggcgtctggttgaccagaggggtaaaattgattatctcaaggtcagaagcaccgccctgttttgagttttatctagcctcacttcgagcgggctgtgtgaccttggacttccccgtctctgggttacagaaccctctgcccttctggtattctctcttgccctaggagaggcggtgggtggtgggctccagagatggtcattttggcgatgtcagctacttttaaaatttcaaaggaaggctgggtaggtaccgtccctttttatagagggaaaaggaattcacctagtaagtcaaggtggcacctaacctgtgtggactacctcgtatgtggtagtacttagcccagaactgagtacttcacgtgtagtatttcatttatccccaaaactttatgatgtagatactgatataaccgcattacacatgtgagaaaactgaggctcagagggtggtatgacttgcccaaggttctacagagagttggtggaaatgaagtcataaattataaaccttccagatcctcccacccctgtgcgctgagagtaacgtcagtgcaaatactgcatggcctagattagcactgtcctatagaaacacagtgcaaaacatctttcttttttgagacagggtcttgctctgtcacccatgctggagtgcagtggtgcaattatggcttactgcagccttgacttcccaggctctaaggatcctccaaccttaggctcctgagtagctggaactgcaggtgcgcgccaccacacccagctttttttttttttttaagtatgggttttggccatgttgcccaggctggtctcaaactcctaggctcaggttatcctcctgcatcggtctcccaaaatgctggcattagaggcatgacccacctcgcccagccagccagaccctgactcttacaaaaaaaaagatgactaataaaatattttgcactcggccgggcacagtggctcacctctgtaatcccagcactttgggaggccgaggcgggtggatcacctgaggtcgggagtttgagaccagcctgaccaacatggagaaaccccgtctctactaaaaatacaaaattagcagggcgtggtggcgcatgcctgtaatctcagctacttgggaggctgaggcaggagagtcgcttgaacctgggaggcagaggttgtggtgagccgagatcgtgtcattgcactccagcctgggtgacaaggcgaaactccgtctcaaaaaaaaaaaaattgcactttttttcatactaaatcttcaaaatctgatgcgtattttacacttacaacacatctcagttcggaccaaccacatttcaaatggtcagtaatcacatgtgggcagtggtgacttacgtcagcacaggtagattagaatcctagatctgctggccaggctcagtaatcccagcactttgggaggctgaggcgggtgaatcacctgaggtcaggagttcaagaccagcttggccaagatggcgaaaccccatctcctctaaaaacacaaaaattagctgggtgcagtgggggtgcctgtaatcccagctacacgggaagctgaggcaggagaatcacttgagcctggtaggtggagcttgcagtgagcagagatcgcaccactgcactccagcctcggtgacagagcaaggctctgtctcaaaaaaaaaaaaaaaaaaaaaaaagaatcctagatctgttatttatgtcattcaaccagaaggtgtagtctttctgtgcctcagtttcttgctcacatggaggtgattggagcccaggttactgtgagaattaaatgcccacacatattcacactgcttactaaattgagtgtggcccatgttcgaacactcttataagcagaacacatttattccttttacatcacaattattatttgagtctgtaaaatgggattactcatatccccaaatcctgaccctatatgaggttctgtattaaggatacatttctcaaagtcccttctctcctcccattttatgttgattatttatttatttatttagggagtgggtctcactctattgcccaggctggagtgcagtggcatgatcttggctgactgcagcctccacctcctgggctcaagcaatcctctcacctcagcctcccgagtagttgggactacaggtgtgtaccagcaggccaggctaatttgtgttatgtatattatatattatatgctatatataatatacatactattcatatatttatgcattatatgtcatatataatatattacatatgtgtacatatatatattttgtaagaatgaggttccaccatgttgcccaggctggttttgaactgccgggctcaaacaatctgcctgcctcaggttcccaaggtgctaggattataagtgtgaactaccatgtccggcttatttttatttatttttgagacagggtcttgctctgtaacccaggctagagtgtgcagtggcaacaacacagctcacggcagcgtcaacctcctggtctcaagtgatcctcctgcctcagccttctgagtagctgggaacacaggcaggcgccaccacgcctggcaattaaaaaaaatgtttttgtaaaaatggcctcctgctatgttgcccaggctggtcttgaactcctggccttaagcattcctcccatcttggcctgccaaagtgttgggattacaggcgtgagccactgtgccccgtgtgtttttagttaatttccacaagagtccttccttcctctcttctatcatgcagcaagtactttttaagcctgttctgtgccaggtgctgcaggtgacactggaggatgcgaagtgaacaaaacaggcagtgtctaacctcaagtaggaagcgccaagcccacaggtgcctgacacaggaacaggaggaagggtcagcaagaggcctgggatggtccccgggatcctcatgggggggaccagactaggcaatactgaatactacctagaggaagtggtagaaccccaacttcccagttcattctcccccgtctttttttcgagatggagtcttgctctgtcacctgggctggtgggctggagtggagtggcgtgatcttggctcactgcaatctctggctcccaggttcaagcgattctcccacctcagcctcccgagtactgggattagaggcacccgccaccacgcctggctaatttttatttatttatttatttttatttttagtggagatgggttttcaccttgttggccaggctggtctcgaactgacctaaaatgatctgcccgcctcggcctccccaagtgctgggtttacaggcgtgagccactgcgcccggccaccatttcttttttttttttttaaccagagacccttgccaagtcattccccccactccactttattttccttttcattttttccttcctctcttttctgagtcacaaccattagccaggaagcaccccctccccaccctctttcctggatccccctcattccctccttccatagtccactcccgcgctcccaggtccagggcttatttgcccagagtttggaaaacccccagctctccttcctcctttctacagcgtgggggcagggtactggtgccagtcacgtgcctctggcttctgaagaagactctagactggggtcggggggtgggtcctgcccatctccctagcatcttatcgtccctaccatctgtgtcttttttccctccccaaacggaaccccctgccctctcgcctgcctatagccgtttaattgcaaaagccaggccgtttgtgggagaccacagacagcgacccccttcatttaccggttgagaggagggtaaaggggcggctgcaatctgggtaataaccctatccccactccagaagtcacagtcacatcgttaagccttcctcccctcttgtcccaggacagctttaaaaacgttaaaagcatttctgctgggtagcatctggccagggtcgccccctctgtctgctcaggaacgtctgtcacttcagagagcttaagtgacttgccccggtcacacagcagcagtccgataggctgccagggctctaggggcagaaggaggagagggctggcattcttcccaccggcccgcgtgactgtagcaccggggtgcagcgaagccccaagggccccaatccgtgagctctctcccatcccaggcaggggtgggggagcagcagtggggtgctggttctcaaatgcaagataagagctggctaagaaagccttgcccagcccctccacctagagggaatgggagggagagaagctgagggcagggtcccggtcccgcgtggagacagctgcgctcccgcggtttctttaaacgcccagatgggcaacgacgcgcgcggacgagggcggggttgggttcaggtctggtcacatgacctggcctgaggtgctcgcggcccccaccccaccagtgggcgtcccccccacgcgtggtcgaccatcattggtcggtggtgaggccaatagaaatcggccatctgggaacccagcgttccgaggcgcagcctaacatagtgaaccgacgaaggtccaatggaaaaagacggccatgggcatagaccaatgacaaagtggcaggggcgggcccaagggctgggtcaggttggtttgagaggcgggtgggtataaaagtgcaaggcgggcggcggcgtccgtccgtactgcagagccgctgccggagggtcgttttaaagggcccgcgcgttgccgccccctcggcccgccatgctgctatccgtgccgctgctgctcggcctcctcggcctggccgtcgccgagcctgccgtctacttcaaggagcagtttctggacggaggtaacgcctggtcccgcctcgaggccgccccgacgacgcggccggcccccgatcctggatctgcgttgtcgcccgtaattaccgtttagaggtccaacacggtggcctcccgggactagagccgcgggcgatttctcttctgcgtccctggggagcgcggagggcgtagcggcctcccgcggcgggagttagggttagcccgaggatctctgaaggcacccgacgtgtcaaactagaggttggaatggggagtgtcggggatctcctttcctgtccccagcagcttgtggctctcggcagatgtttggtgtggggggggattagcacagccgctctgacctacccctctaatcccccacttagacgggtggacttcccgctggatcgaatccaaacacaagtcagattttggcaaattcgttctcagttccggcaagttctacggtgacgaggagaaagataaaggtaagagcctaggagtgggtgctcagatccgggaggacttcctggcagaagtccttgtctgtacacacacagccgggacagtccccttggaggaggacaggtggaggaagtgggggagtcttctctattctctaagtcgagggtcctcgcgagtcaaggcccaacggtgacctcactaccgtcccgtctcaggtttgcagacaagccaggatgcacgcttttatgctctgtcggccagtttcgagcctttcagcaacaaaggccagacgctggtggtgcagttcacggtgaaacatgagcagaacatcgactgtgggggcggctatgtgaagctgtttcctaatagtttggaccagacagacatgcacggagactcagaatacaacatcatgtttggtgagggcctgcttcctggtgctgatctctgtcccattagttagagggagacccagaccccattgactttcttaataatgattttttttggaaggggagctaaaagaataagtcccagcaacaatttattgcattatgatcgcagatctaggctgttaatttaatttgcgtgtttgtatatagttatttcccaatcttactaatgaggattttgagttctagagcactgattttttttttttctcctttaaacttaaggctccacccacagcccattcaggacagaatcagggtctgagtttctcttctcagccttgacagacccgagttgaagaaccaggtcttccttttataaagaggggtgagagcctcgagatgatgggtagtctctgactcttaactggatctgcttcacacctaggtcccgacatctgtggccctggcaccaagaaggttcatgtcatcttcaactacaagggcaagaacgtgctgatcaacaaggacatccgttgcaaggtgtgcctgggggtggtggcaaatggctgtcatggggagattcagaggtcagcctcattggggggtggcccccgctcaccttcttccttcttcaggatgatgagtttacacacctgtacacactgattgtgcggccagacaacacctatgaggtgaagattgacaacagccaggtggagtccggctccttggaagacgattgggacttcctgccacccaagaagataaaggatcctgatgcttcaaaaccggaagactgggatgagcgggccaagatcgatgatcccacagactccaagcctgaggttggtgtttgggcaggggctctgctctccacattggagggtgtggaagacatctgggccaactctgatctcttcatctaccccccaggactgggacaagcccgagcatatccctgaccctgatgctaagaagcccgaggactgggatgaagagatggacggagagtgggaacccccagtgattcagaaccctgagtacaaggtgagtttggggctctgagcagggctggggctcacagtggggagtgcaccaaccttactcacccttcggtttccttctcccttctgcagggtgagtggaagccccggcagatcgacaacccagattacaagggcacttggatccacccagaaattgacaaccccgagtattctcccgatcccagtatctatgcctatgataactttggcgtgctgggcctggacctctggcaggtgagacttggaggaaaaaggaggatccctggggtacctcaagtgcataagatcacccaagaggaaagggacagggtaggcaccccaggtgagtctgactcaaaaatggtacttcttgtaaacagtacttcctggtctgtccctgtgaagtcctcacagcaacccctttaaggttatacttgctgtgcaccaagtacttccccaagtacttttatgcaaatcaacttctttacccccaaagacctagaaggtggtcaggtaacccagttagttagctggggctgggcacagtggctcacccttacaatcacggtactttgggaggctgagacagaggattgcttgaggccaggagttacacaactcaacctagcttggcaacacagcgaggagaccctatctctacaaaaaaaatttttttttttgagacagagtttcactcttgttgctgaggctggagtgcaatggcacgatctcagctcactgcgccctccgtctcctggtttcaagcgattctcctgcctcagcctccggagtagctgggattacaggcatgtgctactatggatgccaggctaatttttttttttttttttttttttgagaccgtgccttgctctgtcgcccaggctggagtgcagtggtgtgatctctgctcactgcaagctccgcacgaccccccaggttcactccattcttctgcctcagggtcccgagtaactgggactacaggcaccccccaccatgcctggctaatttttttgtatttttttttttagtacagacatggtttcaccgtgttagccaggatggtctccatctcctgacctcatgaaccacccaccttggcctcccaaagtgctgggattacaggcgtgagccacctcacccagcctttttgtagagacagggcttcatgttgcccaggttggtctcgaactcctggcctcaggtcatctgcccgcctcggcctcccaaagtgctgggattacaagggttagccaccatgcctagcctctacaaaaactttaaaaattggcgagatgtcatgcatacctgtagtcccaactaccaaggaagaaggatgatcacttgagcctggggcatcgaggctgcagtgagccatgattatgtcactgcactccagcctcggtgacagagtgagaccctctcaaaaaaagttgggacttggccggacacagtggctcacacctgtaatcccagcactttgggaggccaaggcgggtggatcacaaggtcaggagatggagaccatcctggctaacatggtgaatgaaaccccatctctagtaaaaatacaaaaaatttgccaggtgtggtggtgggcgcctgtagtcccagctactcgggaggctgaggcaaaaggatgacgtgaacccgggaggcggagcttgcagtgagctgagatcatgccattgcactccagcctgggtgatagcgagactctgtcccaaaaaaaaaaaaaaatgctgggactgaatttttgtctgttttggtcactgaaataccttctgtgcccaagacagttctggcatgtagtaggtacctgaaaaatacctgaataagagagtgagaaacaagaaacaggtgcagagaactgaagtcagtggcccaaggtcatgggggtaggaaaccacaaagctggggtttgaacctgggcagtacagcacctgagtctctccatctttttttttttttttttttaagacagagtcttgctctgtcacccaggttggagtgcagtggcttgatctcggctcactgcagcctctgccttccaggttcaagtgattctcatgcctcatcctctcgagcagctggaattacaggcatgcgccacgacgctgggcttttttttttttgagatggaatttcactcttgttgcccaggctggagtgcaatgatgcaatctcggcggctcaccacaacctctgcatcccagattcaagcgattctcctgcctcggcctcctgagtagctgggattacagggatgcgccatcacagaccccgggctaattttttttagtagagacagagtttcactatgttgcccaggttggtctcgaactcctggcctcaagtgatccgttcgccatgacctcccaaagtgctgggattacaggcatgagcccgtcccgtccctggctgtctctccatctttccatcttttttttttttttttttttttttggagatggagtctcactctgtcacccaggctggagtgcagtggcacgatcttggctcactgcaagctccgcctcctgggttcacatcattctcctgtctcagcctcccaaatagctgggactacaggcacttgccaccacgcctggctgattttttgtatttttagtagagacggggtttcaccgtgttagccagggtggtctcgatctcctgacctcgtgatccgcccaccttggcctctgggcgaggattacaggcgtgatccacctcacctggcctctccatctttttaactgcagtgtcagcggtgttccttgtcttctctgcagatgcaggcagcagaatatagtggttataggaacacaggtggaaaccctgtccaaagcaagggctatcgggtatcacctctgaccatccttcccattcatcctccaggtcaagtctggcaccatctttgacaacttcctcatcaccaacgatgaggcatacgctgaggagtttggcaacgagacgtggggcgtaacaaaggtgaggcctggtcctggtcctgatgtcgggggcgggcagggctggcagggggcaaggccctgaggtgtgtgctctgcctgcaggcagcagagaaacaaatgaaggacaaacaggacgaggagcagaggcttaaggaggaggaagaagacaagaaacgcaaagaggaggaggaggcagaggacaaggaggatgatgaggacaaagatgaggatgaggaggatgaggaggacaaggaggaagatgaggaggaagatgtccccggccaggccaaggacgagctgtagagaggcctgcctccagggctggactgaggcctgagcgctcctgccgcagagctggccgcgccaaataatgtctctgtgagactcgagaactttcatttttttccaggctggttcggatttggggtggattttggttttgttcccctcctccactctcccccaccccctccccgcccttttttttttttttttttaaactggtattttatctttgattctccttcagccctcacccctggttctcatctttcttgatcaacatcttttcttgcctctgtccccttctctcatctcttagctcccctccaacctggggggcagtggtgtggagaagccacaggcctgagatttcatctgctctccttcctggagcccagaggagggcagcagaagggggtggtgtctccaaccccccagcactgaggaagaacggggctcttctcatttcacccctccctttctcccctgcccccaggactgggccacttctgggtggggcagtgggtcccagattggctcacactgagaatgtaagaactacaaacaaaatttctattaaattaaattttgtgtctccctcctgtgtctccttctggggaaagacagacttaaggaaacccagcagtggtctttttggggggggggggggtttccagtatatctcctttttcagctattgctagagaggttgctgagtgttccacaagattccagggacccttatttaccccataaccctcaaaaccaacgggggaatggctgttgctgctgtaaatactccacatactaacttactgaatccttgaacctaactggtaagttttggttctgcttatttatttatttttaagatagactctcgctctgttgtccaggctggcgtacagtggctcaatctggttcaccctgccccttaaactggcctttttcatgcttctattcctttggggtcctgtggctcagcccaacccctctgggatgcctccaggactggtagatccaagggagaattctgtatttaatgtagtgaggctttgaaagttaacatctttaaatacttctggggtcagattaggtatagtacaacaaagtactcctgcccggagacccaagaatgaaaattgtaggttcattccaaaactccagatccctaaagaatgaatgaggctacaaaatggcaccttgcccccgcttccaacttaaggttttttttctgtgcttggtggcctttcaggtatttctagttttgagtaactttcactttgactgctctacaagggttcctgccaggatacccagaccagaataaaactcatttgggggccgggtacggtggttcacgcctgtaatcccagcactttgggaggccgaggcgggtggatcacctgaggtcaggagttttgagaccagcctggccaacacggtgaaacccaatacaaaaaattatccgggcgtggtggggggtgcctgtaatcccagttactcgggaggctgaggcaggagaattgcatgaacccggaaggcggaagctgcagtgagccgagatcgcgccactgcactccagcctgggtgacagagactgtttgaaagaaaaaattctcatttggaagaggcaaaatgaggtttttacagaagaaatacaaatgtctgtaaccagtacaggtacataaaaactttgttaaaaattcatttgagcgtgagagtggggacaccagagtcactttgcagccccgtgacgtcaccgataacgggcatggcgtcactcaggagaccacgtgtgcgggccgagcaagaagccccgcccacagcgcggagtttagtctgcgcgtgcctcgctcgagaacgcgctcgtgcgcatgcccacaaaggccaaggagggagtgcgcaggtcacgtgcgccggtggtcagcgcgcgcattgcctgccccggaagtggtcggcgcgcggcgcggcgcgcctgggcgctaagatggcggcggcgtgagttgcatgttgtgtgaggatcccggggccgccgcgtcgctcgggccccgccatggccgtcaccatcacgctcaaaacgctgcagcagcagaccttcaagatccgcatggagcctgacgagacggtgcgggccgggccggagcccgggggcgggagcgacgggtttcgggggtggggtgggggcggggaggctagaatcccaacgggaggggcagggaggacggcgcgggtcggccctgcccagacccccgacctgcccgactttcctggaccccccgatggtctttggcccagcccccagccgatcgggcggcgctcctgcgccggtctccgggcgaggccccacccccggggcgctggccaggccccggctccaatgtcagcgctctcgcggggcgcgggagtcacaagctcggattcctgggcaggccaagctctccaagactgggctccacgttcccagctttgcaggcgtctccttgggacactggtggtcgaatctaggagtaatgaccaggagatactgagtagtgacgacaacaacgatgttaatgataataaacgggtctcagtctttataattttggtggtccgtgtttgttggccgtttactttttatcagtcaccgagtgttgtagtgttgttttaccgctctgcaaaacgggcttgtcattggggacctctgatcattttacagatgtggaaacctagggattgaggaactttgccacagtcacacacaagtaatggcagagctgggattcaaattcggttctgcctcgtgtgagcgtccacgatataaatattatgctgcctttttagtcaaaagtagaattaggacctaattcaaacatactgaatgtctattgggtacttggcgctttttgcatagtgagggagacattgaagtccactttttgtagaaaaggaaacacacattttttgatccgctcaagtgtttggctttgggcaagttaacctgcctacctgtctgtgcctccgttttctcaaatatcaaatgaaccggtcgcctgctggcttccgcctgtaatcccagcacttagggaggcagagggaagaggagcccttgagcctaggaattcgagatcatcctggcaacacagtgagaccccgttctctacaaaaaaaagaaacaaaaatcaataaataaaatgagaccaattaaacgtatttcataggaaacttaaaaggtatgacacatatacatttacagtagcactattggccaggcacggtggctcatgcctctaatcctgatgatttgggaggcagaggcaggaggattgcttgaggccaggagtttgagaccagccagtctaacatagggagactcttatctacaaaaaaaaattatttttaattagtctggagtggtggtgtgtacctttagtcctagctactcccaaggctggacaagagtaccagttgagcccaggagtttgaggctgcagtcagcgatgatcgtgccacatcaatccagcatgggcggcagcgagatcctgcctcttaaaattaaaaaatatcactattaactattagtcacttattgtccaaggtagagtgtagagtgggggactgtcccctttattctgttaattatactttatactacccgaaattacattttcttcacattagtgttctctcattgagagcagggacttacttgtgttgagtttgttctgtgctgtggcctctgtgtctaaaacagcacctggcacataatgggtgtttagtataagtaaatactgtgttgaatggcatgatgattgaatgaattcaaatctagcatgctttagatgctgagaaagcttaaaaaacccagcgtgcttgcctttctgccatcagggctggcagtttctctgtcctaaactagaagggaaaagagaatcttggggtctccagtgactgtctgtaccactccctctaggtgaaggtgctaaaggagaagatagaagctgagaagggtcgtgatgccttccccgtggctggacagaaactcatctatgccggcaagatcttgagtgacgatgtccctatcagggactatcgcatcgatgagaagaactttgtggtcgtcatggtgaccaaggtgggtgacgtgtgctggctgggagggtgggtggacgagctggggagctggcaaagagcctgtgtgcccaggagagattagctgtgaacagggcggggccacagcggagcgggttgttgggtctgatagggttgctgatgccagctccctttttcttgctgttgcagaccaaagccggccagggtacctcagcacccccagaggcctcacccacagctgccccagagtcctctacatccttcccgcctgcccccacctcaggcatgtcccatcccccacctgccgccagagaggacaagagcccatcagaggaatccgcccccacgacgtccccagagtctgtgtcagggtaaggcgggggcagcagtcccagcttgggccctgtcctcctagcacattccagcgtccacataagtggtcccacacacctggagggagggcaagccgccagaagccagggtccgatttctctctcttgaatttgcagctctgttccctcttcaggtagcagcgggcgagaggaagacgcggcctccacgctaggtgggtgggtggtccccagggcagaggtgactgggtgccccagccatcagctgggccttgtctgggtgcgggagggcctgggagctgccctttcctcttcctggtgacctaggctttgctgcttcctccacagtgacgggctctgagtatgagacgatgctgacggagatcatgtccatgggctatgagcgagagcgggtcgtggccgccctgagagccagctacaacaacccccaccgagccgtggagtatctgctcacggtgaggtggggcttccgcctcccggggaggccttgagggagtacccgggcgtcactgccctgatgggcggttgggaaggcaaaacctgccctgaaaagcctttgggtagtgattctagccactaaaggcttcccacaggaggctggatgtgagtgatgggtgggcctctggagggcagggccgaggcctcatctgtgtcctgccagggcatggaggagggtggcagcaggaggtctgtgcattagaactaaacaggacccctgacagggaattcctgggagccccgagccggaacacggttctgtccaggagagccaggtatcggagcagccggccacggaagcaggtgggtgtgcacatgccgcatctgccctccaggtacctgactcacattacactccaccccgcagtgctcctaggagcccggcgtggtgtctgactgcaccccttcctactaccagcaggagagaaccccctggagttcctgcgggaccagccccagttccagaacatgcggcaggtgattcagcagaaccctgcgctgctgcccgccctgctccagcagctgggccaggagaaccctcagcttttacaggtgtggtcccaagggcagagggagctagggcagccaccatttcccttccctgtgggcaccagagtccataacacgtaggaatcgttctaggtccggaaagcaggactaagcacatgcttcccccacgcccctgtgcttcctgtgacctggtgacccccctggtttctcagtcttcccaaccaccttgtaaggtgtgggtgctgtcaacatcacctcccacagaagaagacaccggaaacttagagcagcctgtcattcccagggtcacgcagctggtagtgtgtgtgtctgcctcctgcctcggggtggggtcctgggctggggctctggcttcacatacagatggtgctgcgtaaatgtctgtaaggtggcatgacgtcacccaggacagctgtgccccagttggctctgggacaactctgctcagtgaggctccatcttgcccttgaaggttcacaggaagagtgggggagtggccccctgggtgcaagtaggttcctctgggttctcggtgaagtgcctaccggtcttggctcaggaccctgctgtctgacccttctcctctcacttctcagtcccttgccagctcctcctggtcggtcgtgttcttcatctgcactcagccctccctcatagtgtcctggggccttcagtctgtatgggaacccccaaatctatgtagccagcccaggcctctctgaatgccacactccatggctggcttaattaactctccatcaaagtgctccctagactagacgtctaagacttagaacagacctccccagtcctccccgatctctgcaaggattagcttggggttgcttcagccccaggccctggggatctgctggggtctaccccttgtcctgtctgctcttcccactcagcccctccctgcactccagctctctggtagcctcttcctgggcctctgccactgcatagtcccacagtccacttttcaaccatgaggcagatgactaaaaagcactttcttttctttttttttttgagaggaaatctcgctctgtcgcccaggctggagtgcaatggcgcaatcccggctcactgcaacctccgcctcccgggttcaagcgattcttttgcccccgcccgagtagctgggactacaggcgcccgccaccacgcctgactaattttttgtatttttagtagagatgggatttcaccctgttagccaggatggtctcaatctcctgacctaatgatctgcccgccttggcctcccaaagtgctgcaattacaggcatgagccatcacacctggctgactgaaaagcactttcttctttaatgtgaaaatgatcagatgcatacaatggtagagttatatcagagcttccagatacccaggtagggcacagtggctcatgcctgtaatcccagcactttgggaggctaaggcaggcagaccacttggtcaggagttttagaccagcctggccaacatggcaaaaactcgtctctactataaatacaaaaagtagctgagcatggcggcaggccactgtagtcccagctactcaggaggtggaggcaggagaatcgcttgaacccaggaggcagaaattacagtgaaccgagattgccccactgcactccagcctgggtgacagagtgagagtgtctcaaaaagaacagaaacaaaaatgaacaaatgaacttccagatacctaaatccaacacccagatgagttcactttttttggtttgggggctggtaggtgggaatagagacagggtctatgttgcccaggctggttttgaactcttgggcccaagcagtccctcctgccttgcctcccaaattgttgaggttacaggcgtgagccaccacacccggccaagttcacctttctaaaagatccacagaccacgtcttttcccatgtaactgtcaccaccgtggcttccccctgctctagaaaatgggtctgacttgggccttcctctctggtgtcattgtctgcctcctcccccttcccttgttcgctgttttttgttttttttgttgttgttgtttgtttgtttttgagatggagtttcgctcttgttgcccaggctggagtgcagtggcgtgatctcagctcaccgtaacctccgcctcctgggttcaagagattctcctgcctcagcccccagagtagctgggattacaggcatgtgccaccacgccctgctaattttatatttttagtagagatgggatttctccatgttggtcaggctgctctcaaactcctgacctcaagtgatctgcctgcctcagcctcccaaagtactgggattgcaggcatgaggcaccgtgcccagccccattcactctgttcctgcttctgtttctgagacttcccagatgcatccaccctgggcctttgcacttgctgtttgctttacctggaggaaaccctctgcatccgccatactgcaggcctctccaccagccctcatctgcagttccttcctagccagacacttgcagttgtctggttcatttattggctcactcacttattttttgagagtctcttgcccaggctggagtgcagtggcacagtctcggctccctgcaacctctgcctcctgtgttcaagtgattctcctaccttagccttcttgagtagatgggattacaggcacgtgccatcacacccagctaatttttgtattttagtagagacggagtttcaccatattggccaggctggtctcgaactccaggctggtctagaatcacctgaagtgattataggtgtgaaccactgcagccagcctatttatgtatttatttattcaagacagggtcttgctctgttgcccaggctggagttcagtggcttactgcagcctccgcctcctgggttcagtcttatgcctcagcctgccaagtagctgggattacaggcgtctgccaccacacctggctactttttgtattcttagtagagatgggggttcaccatgttggccaggctggactcgaactcctgacctcaagtgatccacctgcctctgcctcccaaagtgctgggattacaggtgtgagccaccgtgcccggcttatttcttggctcacttaaaagcacatcatcagctcttccagggtagggcttgtgtcgactgctatgttgtgtttggccagaacaggctcctctggatatttgcctgactgaatgaaaaagcaagggctgtgatgacctggggagaggaggggaccagggctgtgaattaccttcccttccccaccctctcctgcagcaaatcagccggcaccaggagcagttcatccagatgctgaacgagccccctggggagctggcggacatctcagatgtggagggggaggtgggcgccataggagaggaggccccgcagatgaactacatccaggtgacgccgcaggagaaagaagctatagagagggtaagaggcctggctgaggggtgactgcaggtgggcaggacccctaccctctcctgctcacacttaacctatcttcccacagttgaaggccctgggcttcccagagagcctggtcatccaggcctatttcgcgtgtgaaaaaaatgagaacttggctgccaacttcctcctgagtcagaactttgatgacgagtgatgccaggaagccaggccaccgaagcccccaccctacccttattccatgaaagttttataaaagaaaaaatatatatatattcatgtttatttaagaaatggaaaaaaaaatcaaaaatcttaaaaaaacaagcaaacagtccagcttcctgtcctcctaaagtggcccctgttcccatctcccgggccagacagctgtccccccgtcctcctccccagcccagcctgctcagagaagctggcaggactgggaggcgacagatgggcccctcttggcctctgtcccagctctctgcagccagacggaaaggcggctgcttgcctctccatcctccgaaaaacccctgaggacccccccccatcctcttctaggatgaggggaagctggagccccaactttgatcctccattggagtggcccaaatctttccatctagggcaagtcctgaaaggcccaaggccccctccccagtctggccttggcctccagcctggagaagggctaacatcagctcattgtcaaggccacccccaccccagaacagaaccgtgtctctgataaaggttttgaagtgaataaagttttaaaaactagccctatggtctgtgcctgctggggctccccgcgcccacctgtctgggtcttggggggctggctgggcacaggcaggcatggtgacgggtgcctggaagggggagaggagtctgtgagtccctgcagattgaggcttccggtgtctcctcccccagtgtgtcatttccaggcagtggaccccagcccaacgttacaaggactgcttctccccggcccccaccatcatcaccacagtctgttttggctatacttccccccccaccagccttgtaattggctaattactggagatgaatgttggtaaacagaagccttcttctcttctgccatctgcttctccattatttgcccattgtacaccccccttttcctcccactgaagccccagttagtcagcagggcctagagtccctgtccccttttgagtacagccaagtgggggattccccagctcttaagtattgggggaggaaccaggggacccagagaggcacaccttgagaggacgcagatctcttcaggggtactgccaggtagcaggctttattgggaagggacaaagcctcaggagctgggtgccccagaggctgctgggtcttgagccacagctgcagccaatgcagcagctcgcgcctccttcttccgtttctgtttttcctccttgaggcgcttgcgctccttcttctctaggtcctggagcagctcctggaagcgggcactccttgggtccacctggtagcccaggagctcctgggcctcagcctgcagtcgggccctcctctccttgtcagcctgggccttctcccagttctcccgctgctgctgctgccagttcacaatcatctgtggcatcttggccatgcactctgcgatgtgctgctccctgcaggggagggagagtgggctgtgacactggcactcagccagggcagagcccacccacccatatctcacccataggcctttgcccacgagcctgcctcctcaactcccccagtagattaactgtcaggaaaagcccttgacaagtgaagaaacaggaagagatgatgagaaagttacctgtgcatgaatttgatcacaagggcatgtcaagccccagtaaaccccaggtgccaaagccaaatcagcatttcactgagctgcctactgagcaagccaagtgccactcccatggataatttcacacctttatttcatagacattgctgagcacttcctgtacagaggccaggcccaattctaggcacaggagtgaaagcaagaaagacatttcccaccaatccttgagtttgtagctaccagtcacagccccatttttttcttttaagttcaggggtacaagtgcaggtttgttacgtaggtaaacttgtgtcatggggtttttttgtacagatttatttcatcactcaggtattaaacctagtacctagaggtcatttttcctgatcctctccctccaccctccaaaaagccctagtgtgtgttgctcccctgtgtgtccatgtgttctcatcatttagctcccacttacaagtgagaacacgttgtatttggttttctgttcctgtgttagtttgctagggatgatagcctccagctcccgtcgtgtccctgcaaaggacatgatctcgttcttttttatgacagcctcatttaaggattagaaaagtaaaagaattaagccctataatggtcatctggctgaggaggggcagaaacaggagtccctgctccatgattccctgcctgggtgatcagacgcatgacttcacttcaccaagcctcagtttcctcatctctaaaattagggcaatcccttcttcctcttaaggctattaggaaaacaagaagattaaacaccaggaacacacttgacctacccccttcacgctccaggatgtggcattatctataagagatgcccctggtctggcccgacgcggtggctcacgcctgtaatcctagcactttgggaggccgaggcagatggatcacctgaggtcaggagtttgagaccagcctggccaatatggcgaaaccccatctctactaaaaatacaaaaaatgagccgggtgtggtggtgggcgcttgtaatcccagctactcgggaggctgaagcaggagaatctcttgatcctgggaggcagaggttgcagtgagctgagattgcactccagcctgggcaacaagagcaaaactctgcctcaaaacaacaacaacaacaacaacaaaaagatgcccctggtccttcagacctgcctctgtatctgacctctgccctcttggttccaggacccatcaccttcctgccctcaccttttccccagccacactggcttcctggctgttctttaaggcatatcgtatctcagggcatttgccccagctgttccctttaccagaaactttctacccaagagatcgccccatagctaagtctggttattcaggtctttgcttaaacatcacctcctcagagaggcctgaggcttcccaaaccaaagctgccctcaggcacacactcttcactcttttaccttcctactagtcggctgtcaccattggtattatcttgcctgtcagctgtcgccatctgatattaagggcccttttggggcctgcctcggcctcccaaataactgggattacaggcacgagccaccgcccccggcctgggacagggtcttgcacacggtatgcgctcagtaaagacttggtggtgatggccggacgtgatggctcacacctgtaatcccggcactttgggaggctgaggcaggtggatcacttgaagtaaggagtttgagaccagcctggccaacatggtggaaccccgtctctactaaaactacaaaaatttgccgggcgtggtggtgcacgcctgtaatcccagctacaccggaggctaaggcgggagaatcgcttgaaccggggaggcggaggttgcagtgagccaagatcttgcgactgcactccagcctgggcaacagagcgagactcttgtctccaaaaaacaaacaaacaaacaaacaaaacttgctgatgaatgactaaatggacgttattctgagtttgttttgcggccaggtgagcgtatacataaatctacaacatgcagatgctgcgacgtgaccccgaaggggtaggcacggtttggggcccagttcgcccacggggcacagagggcagccccgcgtctgcctgcacgcacgcacctctcccgacgcttctgctcttcggccagctgcttcacccgcagcgactcctgcatggtcgccaggctcgggtaccattcgcgttcttcggcctccagctcccgcagctgctccggcgacggccataacgaaccggggaccaccccggaggcggcgccgtaacgcgcgaactgcttagccgcgtagcgcggtcccagctgccaccgcggggtcaggaggtcctcggggtctggccaccggggtcccggcctgcggcgcgggggcggccgcgcccggtagccacgggaacccggggccagggtcgccgccacacctagtaggctgcgtgcctgtcgcacggacgccgccatcttggctgtgcggggtcctcacaggcccgccgggctgtccatgcccggtgcctgagcgcgaggcccggtgtgggccagggcagggcgaggggtgtccctgctgcctcagttcgggggagggcggcgaaggggatagtatgggttttatacgtttccaagtataactttaaattttagttaagcagttactgattaaagtcatttttaattttcactttttttcttctcctttctgcacactgacacttaaaaatacatatttttgtcgggcgcggtggctcacgcctgtaatctcagcactttgggaggccgaggcgggcggatcacctgaggtcgcgagttcgagaccagtcttttttttttttttttttcgagacagagtctcgctctgtcgcccaggctggagggtaacggcgtgatctcgggtcactgtaacctccgccttccgggaggagaggagaaaccccgtctctactaaaaatacaaaattagccgggcatggtggcgcatgcctgtagtcccagctccgcgggaggctgaggcaggagaatcgcttgaacccgggaggcggaggttggggtgggccgagatcgtgccattgcattccagcctgggtaacaagagcgaaactccgtctaaaaaattaataaataaaaataaatacatacatgcatacacacacacacacatatacatatatatatacgctcacctggctacaaatatatatttgtgtatttttttctaagtgttcagtgttctttgggtaaaaattgtatttttgttttttgcatatcagaaaccatactgttttattcatccatgtgtcttctgtgcacacagtagccctccaatgaataatctgaaatcatgttgaatgaacacattgaaaaatcaaaaataagaggctgtggcagggccactgatatggtttggctctgtgtccccaaccaaatctcatcctgaattataatccccatgtgtccagggagggacctgtaatccccacatgtcggggaagggaggtggttggatcacgggggtggtttcccccatgctattcttttttttttttttttgccttcaaaaagtttattttattttattttattattattatactttaagttttagggtacttgtgcacaacgtgcaggtttgttacatatgtatacatgtgccatgttggtgtgctgcacccattaactcgtcatttagcattaggtatatctcctaatgctatccctcccccctccccccaccccacaacagtccccggtgtgtgatgttccctttcctgtgtccatgtggtctcattgttcacttcccacctatgagtgagaacatgcggtgtttggttttttgtccttgcgatagtttgctgagaatgatggtttccagtttcatccatgtccctacaaaggacacgaactcatcattttttatggctgcgtaaaaattatatttttaactttacttttatacatttaaactagcatttattaggctgggcttggtggctcacgcctgtaatcccagtactttgggaggctgaagcgggcggatcacttgaggtcaggagttggagaccagcctgaccaacatggcaaaaccttgtctctactaaaaatacaaaaattacctgggcgtggtggtgggcgcctgtaatcccaactactcaggaggctgaggcaggagaatcgcttgaacctgggaggtggaggttgcaatgagctgagatcgtgccattgcactctacccagggtgacagagtgagactctgtctgaacaaacaaacagacaaaaagcccactagcatttattatttttttaatgtaaatgtggctgaacgcggtggttcacacctgtaatcccagcactttgggaggctgaggcaggtatcactgaggtcaggagttcgagaccagcctggccaacatggtgaaaccccgtctttactaaaaatacaaaaattggctgggtgcggtggtgcacacctgtaatcccaactactcgagaagctaaggcaggagaatcgcttgaacccgggaggcggaggttgcagtgagctgagattacaccactgctctccagcctgggcaacagatcgagactctgtctcaaaataaataaataaataaataaataattctgtcacatgctgtgacatggatgaaccttgaggacattaggctaagtgaaagaagccagtcacaaaaggacaaatattgtatgattccacttatatgaggtaactagagtagtcaaattcatagagacagaaagtagattaggagttccaggggttgggggtggaggagtgggagttattgcttataatgtataatatattttatattgtaaaatatacaaaataaataaaacgaatttgtgttttgttttgttttgagtcagagtctcgctctgtctcccaggtgagagtacagtgatgcaatcttggctcactgcaacctctgcctcccagattcaagggattttcgagcctctgcctcctaagtagctgggaccacaggcgcaagccaccaagcctggctgattttcatattttactagagacggggtttcaccacgttggtaaggctggtctcaaactcctgaccttaagtgatctgcccacttcagcctcccaaagtgctaggattacaggtgtgagccaccatgactggccacgttttttttgtttttttttttttgtttgtttgtttttgagatggagtttagctctgttgcccaggctggagtgcagtggtgcgatctccgctcactgcaagctccgcctccggggttcacgccattctcctgcctcagcctcccgagtagctgggactacaggcgcccgccaccacgcccggctaatttttttgcatttttagtagagagggggtttcaccgtgttagccaggatggtctcgatcgcctgaccttgtgatccacccgcctcggcctcccaaagtgctgggattacaggcatgagccaccgcgcctggcctgttgtttttgtttttaatcacacacgcacaccttctctacccccgcaaaaaataactgcagttttctcaagacatgaatgttcatagcaacaccacatatatatgtcattaccaagctggaaatagctcacacccaatgtccatctgaagtagaatggacacctaaattatgctgtttcagccaatggaatactacacaggaatgaaagagcaaatattacatcttctcacagaagatggatgatgcttataagcataatgtgcaacaaaggaagaggacctatatgattgctttttaaattttatttttttgagacagggtattgctctgttgcccaggctagagtgccctggctcggtcatagctcactgcagccttgaattcctgggctcaagcaatcctcccgcctcagtctcttcagtagcaagactataggcatgaaccgctactcccacctacattttaaatttttttgtagagacggggtttctctatgttacccaggttggtcttgaactcctggctcacctcccctcccctcccctcctttcttgacagggtctcactgttgcccaggctggagtacactggcatatcactgcagcctcaatctcctggtctcaagtggtcctcccacctcgggctcctaagtagctggaacttcaggcactcaccatcaagcctggctaatttttgtattatttgtagagatagagtctcaatatgttgcccagggtggtcctgaattctgggacccaagttatcctcccaccttggcctcccaaaatgttggaattacaggtatgagctaccatgcctgacctcagaattttttcatcttgcaaacctgtaactctatacactcactccccagtttccctttcgcccagtccctggcagtcactattccttttttttttttttttttgagacggatggagtctcgctccgttgcccaggctggagtgcagtggcgcgatctcggctcactgcaagctccgcctcccgggttcacgccattctcctgcctcagcctcccgagtagctgggactccaggcacccgccaccacacccggctaatttgtttgtatttttggtagagacagggtttcaccgtgttagccaggatggtctcgatcccctgacctcgcgatctgcccgtctcggcctcccaaagtgctgggattacaggcgtgagccaccgcgcccggcctggcagtcactattctaccttgtttctatgaatttgactactctaggtacctcatataagtcgaatcatacggtacttgtccttttgtaactggcttattttttattttgagacagagtcttgctctgttgtccaggctgaagtgcagtggcacaattattataactggctgcagaatcgacctcctggactcaagtgatactcccacctcagcctctcaagtagctgaaactacaggtgctcacctggctaattttttttttttttttttttttgagacagggtttcgctctgtcgcccaagctagagtgcaggggcgccatctcggctcactacaagctccgccgcccgggttcacgccattcttctgcctcagcctcccgagtagctgggactacaggcgcccgccaccacgcccggctaattttttgtatttttagtagagacggggtttcaccatgttagccaggttggtctcgatctcctgacctcgtgatcctcctgcctcggcctcccaaagtgctgggattacaggcgtgagccaccacacctggcctttttttttttttttttgagacagagtacttactctgttgcccaggctggagcgcagtggcatgatctcggctcactgcaacctctgcctcccaggctcaagcaattctcatgcctcagccacctgagtagctgggactacaggtgtaaaccactgcacctggggctggctgattttaattagtataatatcctaaaatttctttctttctttctttctttctttctttctttctttctttctgtctgtctgtctgtctgtctttctttctgtctgtctttctttctttctttctgtctttctttctttctttctctttctttctttccttctcttctcttctctccttccttccttcctttctttctttccttccttcctttctctttctttcgacattctctctctatcgcccaggctggagtgcagtggcactgtcttggatcactgcaacccccacctccccggttcaagcaattcttgtgcctcagcctcccgagtagctgggattacaggtgcccgccaccacacctggctaatttttgtatttttcgaggtttcaccatgttggccaggctgatctcaaactcctgacctcaagtgatctgcccacctcagcctcccaaagtgctgggattacaggtgtgagccaccgtgcttggcatatcctaaagtttcatccatgttgtagcacgtgtccgaatttctttttttcttttttttgtatttttagtagagacggggtttccccgcattagccaggatggtctcaatctcctgacctcatgatccgcccgcctcagcctcccaaagtgctgggattacaggcttgagccaccgcacccggccaacgtgtcagtatttctttcctagcctgggcaacactgtgaaaccctgtctctccaaaaaatacaaaaattagctggctatggtggtgcatccctgtagtccctcctacttgggaggctgaggtgggaggtcaattgagcctgggcggtgaagtctgcagtgagctgtgagtatgtcagtgcactccagactgggtgacagagcgagactgtctcaaaaaaaattttttttttcctttttaaggctgaatgctattccattgtatgaatggaccacattttttttttcccaattgcagatgtcaggctgaaagaatggaccacattttaggctgggcacgatggctcatgcctgtaatcccagcactttgggaggccgaggcaggcggattacaaggtcaggagttcgagaacagcctgtggtgaaacgctgtctctactaaaaagacaaaaattagccgagcgtggtggtgcgtgcctgtaatcccagctactcaggaggctgaggcaggagaatcgcctgaacccaggaggtggaggttgcagtgagccaagatagcgccactgcactctagcctgtgtgacagagtgagacttcgtctcgaaaaaaaagaaaaaaaaagcggccaggcacggtggctcacgcctgtaatcccagcactttgggaggccgagacaggcagatcatgaggtcaggagatcgagatcatcctggctaacatggcgaaaccccgtctccactaaaaatacaaaaaattagccgggcgtggtggcaggcacctgtagtcccagctactcgggaggctgagacaggagaatggcgtgaacctgggaggcggagcttgcagtgagccgagattgcaccactgcactccagcctgggcaactgagcgagactccgtctccaaaagaaaaaaaaaaaagaatggtctacattttgtttatccatttatctgtacgtggacatttgagctgtctccaatttttgcctattgtgaataatgatcttatgaacatgggtgtacagcatttcttcttcttcttctccttcttctccttctccttcttcttctctttctccttctccttcttgttcttctccttcttcttctttcttctttcttcttctttttatgagacagaatcttactgtgtcatccaggctggagtgcagtggcacgatcttggctcacagcaacctctgctaggttcaagcgattctcttgcctcagcttcccaagtaactgggagtacgaccgggcacagtggctcacgcctgtaaccccagcactttgggaggccaaggtgggtggatcacctgagatcaggagtgtgcaccaccacgccgagctaatttttttttgtatttttagtagagatgagatttcgccatgttggccaggctggtctcaaactcctggcctcaagtgatctgcccacctccacctcccgaagtgctgaggcttttattctttttttccccgctgagacagagtcttgctctgtcatccaggctggagtgtagtggtgcaatctcaagtcactgcaacctctgcctcccaggttgaagcaattctcctgcctcagcctccggagtaactgggattacaggcacacgccaccacgcccagataatttttgtattgttagtagagacagggtttcaccatgttggccaggctggtcttgaactcttgacctggtgatccacctgcattggcctcctagagtgctaggattacaggcgtgagccactgtgaccagcctggtttttattcctttttttttgtttgtttgttttttgagatggagtctcgctctgtcacccagactggagtgcagtggtgcaatctcagctcactgcaagctctgcctccctggttcacgccattcttctgcctcagcctcccaagtagctgggactacaggtgcccaccaccacacctggctaatttttttttttttttttagtagagacggggtttcaccgtgttagccaggatggtctcgttctcctgacttcgtgatccacccaccttggcctcccaaagtgctgggattacaggcgtgagccactgtgcccatcctcaggtgtttattcttagtgaaataaagtagcatagaatcaaattaccagattgtttctagtaattactgtcacactgtgggcctcctcctgaggcttttttctgagggagatgagagccatggaaggttctcatcacagggaccagtcttgactcaggtgctcacaggcgccctctggccgctgtggggggaataaactgtggggggccggtggccagggcgggaactgggagacctggaaggaagcgactgcactgatccaggtagggggacaaggagtgggtgagaagcgggcggattctgggtagattctggagctgaccggagttactgtcatataagattgggggcggggatgggtgttagagaaagagataggtcaaaggtgctctccaaagtttggagccttagcacctggcaggacagagctgcctttaactgtgtctagaggacagcagaagggcaggttgggggacagtcaggagctgggatgtagcagagctgggtgggaagcacgcccgcccctccaggcttggcctctgggaggcgggtgtcctgggcgcggccgccgcacagtcccgggagccgccgccagagggcgagcacgccgcatcgcactcgcagctccgtggaggggagggcgcgggaaaggctggcctggtctcttcccacggccccccggcctccaagctcctcacctgggtgcgagatagaggtgccaggatccagccaggaccccccagacacctccggggccccaaagcctgggatacgactctcaccctctttatctgcttctaacactcccaacctccacccccacaccaagctgttcccaccgcctccagcgccatctcaggtgtctgtaaaaatgccacctactcggggaggccttccctgaccaccctggagacagaagcccccgccctgacgcctctaaggaacatcccattttagcagcttcttaatcaagactgtgaaatgatctttattattattattattaatatttttgagaaggtctcactctgtcactcaggctggagtgcagtggtgtgatctggctcactgcaaccttcgcctcccgagttcaagcaattcttctgcctcagcctccagaggtagctggggttacaggctcatgccaccacgcccggctaatttttttttttgagacgcagttttactcttgtccaggctggagttcaatggtgtgatctcggctcatcgcaacctccgcctcccgggttcaagcgattctcctgcctcagcctcccgagtagctgggattataggcatgtgccaccatgcctggctaattttgtatttttagtacggacggggtttctccatgttggtcagactggtctcgaactcctgacctcagttgatccacccgcctcagcctcccaaagtgctgggattacaggtgtgagccaccacgcccagccttgcccggctaatttttgtattttttagtagagatggggtttcgctatattgtccaggcctcaagttatctgccctcctcggcctcccaaagtgctcggattacaggcatgagccactgcgtgcggccccttaattatcttttattgtctgttttctgcaccgtgtaaaatccatggcattttctgtcttgtcctcctgtatcaccagggctcaggattaagtctggcctatactgagtgttaaaggaaaaaaaaaaaaaaaacagctgggcaaggtggcatgtgcctttaatcccagcactttgggaggctgaggcaggaggatcacttgaagccagcagtttgagacaaacctggtaacatagtaagatcccgtctctgtgaaaatttaaaaatcagccaggccgggtgcggtggctcacgcctgtaatcccagcactttgggaggctgaggcgggcagatcatgaggtcaggagatcaagaccatcctggctaacacggtgaaaccccatctctactaaaaatacaaaaaattagccgggtgtggtggtgggcgcctgtagtcccagctactcgggaggctgaggcaggagaatggtgtgaacccgggaggcagagcttgcagtgagccaagatcgctccactgcactccagcctgggcgacagagcgagtctccgtctcagaaaaaaaaaaaaaaaaaaaaaaatcagccaggcatggtgttgtgtacctgtagtctcagctattcggtgggtttgaaacaggaggattccttgagtctaggaggttgaggctgcagtgagatgcaattgtgggactgcatgccaacctgggtgacagaacaagaccctgttaaaaaaaaaaaaaagccaggtgcggtggcttacacctgtaactccagcactttgggaggccaagacgggcagactgcctgacctcaggagttcaagactaccctgggcaacatggggaaactccatttctactaaaaaaaaaaaaaaaaaaaaattagccaggcatggtggcaggggcctgtagtcccaactactcgggaggctgaggcaggagaattgcttgaacccagaaggcggaggttgcagtaagctgagatcacaccactgcactccagcctgggggtgacagagggagactgtctcaaagaaaaaaaaaagaagaagagaaaaacaagtcaggcaagatagcttcctgtgcctatattcccagcattttgagacctgcttttcaagaccagcctgggcaacatagtaagaccctgtgtcaaataaaaaaataataaaataaaaagaactggcagggcatggtggctcatgcctgtaatcccagcactttgggaggctgaggtgggcggatcgcttgaagtcaggagttcgagaccagcctggccaacatagtctctactacaaatacaaacattagctgggcatagttgttcacatctgtaatcccagctacttggggggctgaggcaggagaatcacttgaccccaggaggcagaggttgcagtgagacgagacacagtgagactctgtctaaaaaaaaaaaaaaaaaaaaaagaacacaaaaacccagcaacaataatgttactcagagctgattcatggtgttactgtgtaggaacctctgttttaagctccttacataaattacctccttgagtcctcagaataacccaatgagatagggactgttttatcttcatattacagaagaagaaggtagggaccaggatggttaagggatttactcaaggttgcacagccaggaaattgcaatgcctaggccgaacccaagaaacctggctgcaaggtatgctagtttttaattttttttgagacagagtctcactctgttgcccagtctggagtgcagtggcgcgatcttggctcactacaacctccgcctcccgggttcaagcgattctcctgcctcagcctcctgagtagctgggattacaggcatgtgacaccacgcctggctactttttgtatttttagtagagacggggtttcacttatgttggccaggctggtcttgaactcctgacctcaggtgatctgcccgcctgagcctgccaaagtgctaggattacaggtgtgagccaccgtgcctggccataatttttgtatttttattttatttattttttaattttttttgagacagagtctcactcttgtcgtccaggctggagtgcagtggcgcgatcttggctcactgcaagctccgcctcctgggttcaagcgattctcctgcctcagcctcctgagtagctgggattacaggtgcccaccaccacgttcagctaattttttttgtatttttagtagagacggggtttcaccatgttggtcaggctggtctcaaactcctgacctcgtgatctgcccgcttcggcctcccaaagtgctgggattacaggcgtgagccacctcaactggcgaattttttttttttttttgagacggagtctcggtctattgcccaggttggagtgcagtggcgtgatctccgctcactgcaagctccgccttctgggttcaggccattctcctgcctcagcctcccgagtagctgggactacgggcgcccaccaccacgcccggctaattttttgtatgtttagtagagatggggtttcaccatgttagccaggatggtctcaatctccggacctcgtgatctgcccacctcagcctcccaaagtgctgggattacaggcgtgagccaccgtgcctggccaatttttgtatttttaaagtagagatgaggtctcaccatgttgaccaggctggtcttgaattcctgacgtcaggtgatcctcccgtctcggcctcccaaagtgctgggattacaggtgtgagccactgagcctcacccaaagtgtgcttttgctaattggagaatcggggtcccaggactggaaatgcagctgcccagggtcttcagacattgtgtgtctcggcccctggccccagacctgtctttcctggtccccacagctcgcacacagcaggaccagcccccatgtctctcagcaagttgggaggaggtgtgggaacccagctggtctgaatttactctcctcccccgctgtgggtctacagaaatgcctcccaggctatccaggaggggccaagagattaaaagcaggttcagaaggctcagatgccactcaccagacagcagggtcgactgctagtgaccttgagcccagtccggacagacagacaggcagacagacgcacggacaagcagatgctccttggccagctatccactcttctgtgcctgcttagcggggccctgcctacaggctcagggaggcctgaaccccagtctcctcgacctcagtcctgggctgcagccaatcagacctgggctctgggcccaggggccctgcccccactggtgccagcttctgcccttgggagctggaaggccttcttgggcctgcagaaagccaggcagctggggatgggcaggctgcagcgtgggcaagacgaggtggctgctgtgactctgccgctgaaccctcaggaagtgatccaggggatgtgtaaggctgtgcccttcgttcaggtgagtgggtgggtgtggggaggagagggctgggtctcaccattggcagaaggcacaggctgtggcccaagaaagatttgggttcaagtcctgtatcctccacctgaatgtctcggtgcctcagtttcctcccttgtaaaatgcgacccaagcctcctctatcctggtctccttgattccactatcatgcccctctccaccccccagtctatttttccactcagcagccagagggtgcctgtgaacaccagagtcagatctggttccccctccccctagaaccttgcatggctcccactttactcagaacaaaagcccaagtcctcttcacagcccacaaatttctgtactctctgatcctgttacctccctgatttcacctcctcccactctccccctcagttactttgcttctacacatcagcctccttttcctcagacaccaactttctttctgtttttttagacacgggagtctcgctatgttgcccaagctagtcttgagcttctggcctcaagcaatcctcccacctcagcctcctgagttctaggtgtgagcccgtctcttgcttgatataccaactttctttcttttctttctttctttctttttctctttctttctttcttttctttctttgtttttctttttttctctttctttctttctttctttcctttctttctttcttttctctctctctctttctttttttgagacagtctcactctgtcacccagactagagggcagcagtacaatctcggctcactgcaacctccacttcctgggctcaagtgattctcgtgcctcagcctcccaagtaattgagattacagatgtgcactaccatgtccggctaaattttgtactttttgtagagacgtggtttggccatgttggccaggctggtctcgaactcctgacctcaggtgacccgcctgcctcggccccccaagtgctgggattacaggcgtgagccactgcgccaggccaatgagaagtctcttatgaggaagatggctcaggatttaagcagagaaggaccaggatttgggggagagatgatagatccacttggaggggatcataggaggaactaacatgcattgagcacctactttgtgccaggcagtgggctaagggctttctgttggatgcttccgggctcctgtgatactgctgtcccttccccctagggtgctagttggcttcctactggtaccatcatcaggccatcttatcatcatatcctgcttggcttttctttacttttcttttcttattatttattttattttattttatttttgagatagagtctcgctctgctgcccaggctgcagtgcaatggcgcgatctcagctcactgcaacctccgcctcccgggttcaagcgattctcctgccttagccttccgagtagctggttttacaagcacacgccaccatgcccagctaatttttgtatttttagtagagacgggctttcaccatgttggtcaggctggtctcaaactcctgacctcatgatccacctgcctcggcctccccaagtgctgagattacaggcatgagccactgcacccggccttctttacttttcttttcaggtttttgttttttgagacagagtctcactctgtcgcctaggctggagtacagtggtgcaatctcggctcactgcacctccatctcccgggttcaagcaattctcctgcctcagcctcccgagtagctgggaccacgggcgcctgccaccatgctcagctaatttctgtatttttagtagaggcggggtttcactatgttggccaggatggtcttgaattcctgacctcaaatgatccacccacctcagcctcccaaagtgccaggattacaggcgtgagccaccacacccggccttttcatgttttttgttagagacagggtcttactctgtcacccaggctggagtacagtggtgcgatcatagctcactgcagatttgaattcctaggatcaagcaatcctcctgcctcagccttctgagtagctaggcctacagacgcacagcattagcccagctaatattttttttttttttttttgagacggagtctcgctctgtcgcccaggctggagtgcggtggtgggatctcggctcactgcaagctccgcctcctgggttcacgccactctcctgcctcagcctcccaagtagctgggaccacaggcgcccaccaccacgcctggctaatttttttgtatttttagtagagacggggtttcaccatattagccaggatggtctcgatctcctgacttcgtgatctgcctgcgttggcctcccaaagtgctgggattataggcatgagccaccgtgcctggctagctcagctaattttttttttttaatttctttgtagagacagggtcttactatattgcccaggctggtctcaagccaccacatcccgcccttggcttttaactccgaggtaaccaattccctgaattagtcctctttgttgaaaggcctaaagtgatttcttctttttctcatttaattaatttatttgtttatttatttcggagacagagtctcgctctgttacccaggctagagtgcaatcatgatctcaacttgctgcaaccttcacctcccaggttcaagcaattcttccacctcagcctcccatgtaactgggattacaggtgtaggtgcccatgcccggctaagttttgtattttcagtagagatggggtttcgccatattggccaagctggtctcaaactcctggcctgaagtgatccgcccacctcagcctcccaaaatgctgggattacaggcttgagccaccacacctggctgtctttgttgaatttcttttcttttttttttttttttttttgagacggagtctcgctctgtccccaggctggagtgcagtggcgctatctcggctcactacaagctccgcctcctgggttcacaccattcttctgcctcagtctcccgagtagctgggactacaggcgcccaccaccacgcccggctcattttttgtatttttagtagagacggggtttcaccgtgttggccaggatggtctcgatctgctgacctcgtgatccgcccgccttggcctcccaaagtgctgggattacaggcgtgagccaccgcgcccggcccttgttgaatttcaatgattttccaggtgaggaaacaaaagctcagagaggctaagtaatttgccccatgtctcagccaagagacagcagagtcaggatttgaacccaggcagcctggctgcagcatccatgcctgtcaaggtggggtggaagtggacaggtgattatcctcgccactctggccccaaactccgccaccctgaccgtctccatgcctccggccccaggtgttctcccggcccggctgctcagccatacgcctccgaaatcatctgtgctttggtcattgctcctctctctacatccctggctcggaccccaccccactagtcctgtgcaacagctgtatgcctgctcgcaagcgttgggcacccgtggtcctgtggtgtctcactggcagctcagcctcccgtcgacgggtgaagatatccaccatgctgatcgaggggtgtcactgcagcccaaaagcatgaactgagcatcgtggatgggtgcacggagacacgcaccttggagaaatgaggggagatggaccaagaaagacgtggacctggatgatgtactctgggtcaagagaccagggatgcagggttaggcagacaggtccccagagtcctcaccctgctccccagacagtagacacagtgcccgtcctggagttgcaccactgatagtcacagcacacaatgattgacaactcactttttttttttttttttgagatggagtctcgctctgtcgcccaggctggagtgcagtggcgcaatctcagctcactgcaagctccacctcccgggtttatgccattctcctgtctcagcctcccgagtagctgggactacaggcacccgccaacacgcccggctaattttttgtatttttagtaaagacagggtttcaccgtgttagccaggatggtctctatctcctgacctcgtgatctgcctgccttggccttattattttttttttttaaggacagagtctctctctgtcacccaggctggagtgcaatggcgcgatcttggctcactgtaacttccacttgccaggctcaagcagttctcctgcctcagcctcctgagtagctgggactacaggcacccgccaccatgcccagctaatttttgtatttttagtagagacagagtttcaccatattagcctggctggtctcaaactcctggcctcaggtgatctgcccacctcggcctcccaaagtgctgggatcaaatccactgttaatcattaggctgaactgtctcttatagaatgaggtcaaagacactcccagttgcagggagggtagatggccccacccagaccgagagacacagtgatgacctcagcctagggacaccaaaaaagaaaaaaaaaaaaacccaaaccaaaaacgcaaaccaaagcaggcaggcagacagctgctgggggaaatcctggggtccttgagacagaggcaggaccctcgtgttcccagctgcctcttgccttgatagtggtgctgtgtccctctcagaccccccacctgagtctccacagagccccacgcctggcatggcattccacagaaaccataaaggttggctgagtccagctgtctatatgtgcatctgtttgttcctccaactggggttccctgggagtgggtggccccatgacagggtgtgggcatctgagtgctccctccccagctggggctcagggtcttcagcgggcgagggcggcctggctttgggcggctggaaccagggccctggcagatgggcctgtctggcacagacgcagggacatgtggcgttgtcagtgttgcctccaaatgccccccggagcgtggggcggggagccggccaggcccttctcagccctcttcctgcctcaggaaggaaggcctcaggtgaggggagcaggaggggacccgaggaaacagatgggccagtggggcgtgggagcctgagacccctgacctcacaggcctcacagagagatgggaacgggacaggcaggcagctcccaaggccccttgctcgaagggccctggaggggagggtcatgaagggctctgggggggctgccccatccctgttccctccagagttctgtgccaaaccccaggcagtgtccgagtgggcagctcagccctggcaccatgggcaagcccccctctggtgggcatgaggcatttgccttccctccctctgctgtgcccacctcctgccagccaggggagccagctgggaaccttggtgccaggggagcccccagagtccctgtcccctcccgggcagtgccagccggcccctgccccgcccccccaggcccagtaatgggtgggtaatgagtgctgggggagcgggggaggggcaggggatgcaggtgccacaggcgctggcacgggggccgctaatcaggtttgccaacgccatctgtcaccgcacgagcatctggggctcaaggtgaccctgtcaccctcagttacaattatgagtttggcatctgtattaaagcccgccagccggccaggcgggggacggctggggtgggcacggggttgcacggtgaaccccatccctggggtacccttcccaggggctgcgtggctgccaggcgtggagcttcttaggggactatgtctgtgtgtgtatgtgtgtgtgtgtgcacacccatcccagtctccacaattcttaaagtgtgtccgggtgcagggctggaaatcataggtttgtgtgtgtctccatggtggctgtgtgtctaggagtttggtgggctggctgggggcggagctctgagattttgtgggtgcacagatgttcgtgcatctgcatgctgggacaagaacgtatggaggagggtgtctctttggatgatggtgtgtctttttcttttattagtagtattaattattattcttatttgagtcagggtctcgccctgtcacccaggctggagtgatcatggcccgatccctgcagcctcaaactcctgggctcaagtgatcctccctcctcagcctcccgagtagctggggctacaggctcatgacaccacgcccagctaattttgtttatttttttgtagagacagggtctcactgtgttgcccaggctggtctcgaactcctgggctcaagccatccttctggtttggccttccaaagtgctgggattataggcgtgagccaccacacccaacctgatggggtgtgtgtgtgtgtgtgtgtgtgtgtgtaaatgcacaggggtaggttgggaggggtatcagctttgggagaggccatgtgcagtactgctgagctcctcagctatccctttgtttctatcttcgccaactcctgctacgtggctgtgatctggagggctctgaggacggcttaagaatctggattttggctgggtgaggagtctcacgcctgtaatcccagcactttgggaggccaaggcaggtggattcattgagctcacaagttcgcaaccagcctggccaaaatggcagaactatgtctccacaaaaatatattaaaaattagctgggcgccgggcgtggtgactcatgcctgtaatctcagtactttgggaggctgaggcgggtggatgacctgagatcaggtgttcaagaccagcctggccaacatggcgaaaccccgtctctactaaaaatataaaaattagccaggcgtggtggcgcgtgcctgtaatcccagctacttgggaggctgagacaggagaatcgcttgaacccaggaggcggaggttgcagtgagccaagatggcgacactgcactccaggctgggcgacaaagcaagactccatctcaaaaaaaaaaaaaaaaaaaattagctgggcatggtggtgtgtacctggaaccccagctactcaggaggctgaggtgggagaatggcttgagcctgggaggcagaggttgcagtgagccaaggttgtgccactgctttccagcctgggtgatagagccagaccttgtctcaaaaaaaaaaaaaaaaaagaaagaaagctctcaattttgtaaggtagcctttggattctaaattcttggagctagattctgggtctggtggattctagttttgagcaataggatctagatttttggaatctgaatcccggagtatggtttcagtggcaccatcatagttcactgcaacctcagacatgtgccactacacccagctaatttttaagttttttgtagagataaagtcttgctatgttgcctatcgtgtcccaaactcctggcatcaagtgatcctcacgccttggcctcccaaaatgctgagattatagctgtgagccaccacgcctggctgagttcgtggatctggagtatagatcttggtatgattggaatcttttttttttttttttgagatggagtctcactctgttgcccaggctggagggcagtggcgcaatctcagctcactgcaagctccgcctcccaggttcaagcgattctcctgcctcagcctcctgagtagctgggattacaggtgcccactaccacacccagctaatttttatatttttagtagagacggggtttcgccatgttggtcaggctggtctcgaacccctgacctcaagtgatctgcctgccttggcctcccaaagtgctgggattacaggcatgagccaccgtgcccagcccggtatgattggactctagatgctgatcctgggtcctgggatctggattaccggctcttagttctgtatctgcgttcctgcttctggacttcagtctctgggcctgtgtgctctgtgtcctctctgtccacagctccaagttcagcaactgggcggctgcctgtcgtccctccatggatgggtgcagagaccacctatggccaccaggggacacccttggtctacatttggtccaagctgcccgactggaggaggagtctgggaccactgtggcccagttggactcagccctttcaggaggaccaggggctggacatcactttcccccacttccatcccagtctctgctgggacctgaaatctgtcagcccccactgactcaaacgtggagaactggactgagcacccccacagtgttctgaacagtaccgtgggacaaggtgcctgcccagtgagtaggtcagacccagggttgaagccatgtgtgtccatgagggtgacaatgagtgtctgaaaacgtgtccaggtgtgaaggcgagggtgcaccattcatcaggagtggccacatatgacagcattgctaagaagtgtgagcctgggaggcgcggtggctcaggcctgttgtcctggcgcataagaaagtgaggcccaaggccgggcgggcggatcacgaagtcaggagttcgagaccagcctgaccaacatagtgaaaccccgtctctactaaaaatacaaaaattagcctgtcgtggtggcgcgtgcctgtaatcccagctacttgggaggctgaggtatgagaattgcttgaacccagaaggcgaaggttgcagtgagctgagatagtgccactgcactccagcctgggcaacaagagcaagactccgtctcaaaaaaaaaaaaaaaaaaaaaaaagtgaggccaggcgttcaagccctcatctatgtaacaaaacaacaacaacgacaacaaaaatgtgaacctgtgtgttggatggtgtgtggccaccactcactgtattcacatgtctgataaggtcctcatgagacagtgcacctacacggttgtgtctataactgggagatgtcaccaggagcccttgtatgagtccgtgtccatgtcatattcatgtgtctgcgtctatgattgtgtcactaggaatctataggtatccataggtatgactgggaccatctaggggaagtgtcactgggtgacggtgtcctggagtgtcagaaacagtgtcctggctgggtgcaggacctgtaatcccagcactttgggaggctgaggcgggcagatcacctaggtcaggagttcaagaccagcctggccaacatggtgtaacagtgtctctactaaaaatacaaaaattagccaggcatggtggtgtgtgcctataatcccagctactagggaggctgaggtgggagaatcgcttgaacctgggaggcagaggttgtagtgagctgagatcatgcgccattgcactccagcctgggtgacagagcgagactctgtctcaaaaaaaaaaaaaaaaagaagcagtgtcccagcactttgggaggccaaggtgggaggatcatttgagcctaggagttcaagaccagcctgggcaacatagcaagaccctgtctctacaaaaaatttaaaaaattagcggaacatggtggcatgcacctgtagtctcagctactcaggaggctgaggtgggaggatcacttgagcccaggagttcaaggctgcagtgagctatgattgtgccactgcactccaggctgggtaccagagcaagactttgtttcaaaaataaataaatatggctggacatagtggctcatgcctgtaattccagcactttgggaggctgagatgggcagatcacctgaggtcaggagttcgagaccagcctggccaacatggcgaaatctggtctctaccaaaaatacaaaaatcagccagatgtggtggcatgtgcctgtaatcccagctactcgggaggctgaggcaggagaatgatggaacccaggagacagaggttgcagtgagctgagatcgcaccactgcactccagcttgggcgacagagtgagactccatctcaaaataaataaataaataaaataaagaagcagtgttcctgaaggctgagcctctgtgtcaacagtgtcttatcaggggctgtgtgaaggtgtgtaggacagagggtatgctttctgagagtaccaaaccagggtgagtggaaggggcaggtgggaccagagactctcagagcagggagctggggttgtttccaagtttctctccttcattccctcacatctgggtatatctcaccctccatcttgctatgtctttttttttttcccttgggacagggtgtggctctgtcacccaggctagagtgcagtggtgcgatcatgtctcactgcagcctcaaactcctgggctcaagtgatcctcccaccttagccgtagctgggactacaggtgcaggacaccacgcttggctaattaaaaaaatttcttttttctttttctttttctttttttcttttcttttttttttgagacagtgtctcactcttgttgcgctggctggagtgcaatggtgcaatctcggctcactacaacctccgactcccaggttcaagcgattctcctgcctcagccttccaagtagctgggattacaggcgcatgccaccacacctggctaattttttgtagttttagtagatacggcgtttcgccatgttggccaggctggtcttgaactcctgacctcaggtgatccactcgccttgacctcccaaagtgctgggattacaggcgtgagccatcgcgcccagcccttaacatgttttttgtagagatgaggtcttaccatgttgtccaggctggtctcaaactcctaggctcaagcattccacacaccttggcctttcagagtgctgggattacaggtgtgagccatcacacccggccgctatgtctttctatggctgtgtgtcctctgacctctcagcacttctgactttgtctggctatccccattcccctgatttttttttattttttatttttatttatttattttttttgagacagggtctcactctgtcgcccaggctggagtgcgatggtgtgatctcggctcactgcaacttctgcctcccaggctcaagagattctcctgcctcagcctcccgagtagctgggattacaggcgtccaccactactgcccggctaatttttctatttttagtagagacaggttttcaccatgttggccaggctactcttgaactcctgacctcaaatgatccacccgcctcggcctcccaaagtgctgggataacaggcgtcagccaccgcacccaaccccccatcccctgatttttcccattgctaagcacagcacaccaggcaaggagggtccaggggtattggctgactggtcctgtcccgtctctcaccccaacccttcctctcccatcttgctcccgggctctgcctctccgtggtcttctccctccacccgtccttcctcattggtgtgtttctctccaccttccaggtctctcccgttgtttctccctcttggattccccatgtctttccctatctctgtctctgtctttgtctctcttctgtctctttccccacctttttttttgtgagacggagtctcgctctgttgcccaggctggagtgcagtggtgtgatctcggctcactgcaagctctacctcccaggttcacgccattctcctgcctcagcctcccgagtagctgggactacaggtgcccttcaccacgcccagctaatttttttgtatttttagtagagacggggtttcaccatgttagccagcatggtctcgatctcctgacctcgtgatccgcccgtcttggcctgccaaagtgctgggattacagtcatgagacaccgcgcccggcctcctttttttttttttttttttttttttgagacacagtctcgctctgttgcccaggctggagtgcagtggcgtgatcttggctcactgcaacctccaccttccaggttcaagtgattctcctgcctcagcctcacaagtagctgggattacaagcatgcaccaccacacccatctaatttttgtatttttagtagagacggggtttcaccatgttggccaagctggtcttgaacccctgacctcgtgatctgcctgcctcagcctcccgaagtgttgggattacaggcatgagccactgtgccctgccttctttccccttttgtgtctcatttctcccactccatctcctcttgtccattcttcccagccctaaatcttctcctatttatgtctcttttcatctctctccttttctcctaatttttccctgtccctctcatctccctatctctcctccttttttctcttgtttatttatgtatttattttgagacagagtctcgctctgtcacccaggctggagtgcagtggcgtcatctctgctcactgcagcctccacctcccacattcaagcaattctcgtgccccagcctccggagtagctggaattacaggcacgtaccaccacacccggctactttttgtatttttagtagagacgggggtttctccatgttggccaggctggtctcgaactcctgacctcaaatgatccgcccacttcggcctcccaaagtgctaggattacaggtgtgaacccccatgctcggcctcctctctccctttatctctgtctcttcccgttttttttctctcccagtgtctccttatctgcctctccctgcctagtctcccgtctctctccatctctcagtctccgcatctcttctctcatcatgtctctcccatcttttttcccctcatttctctgtctctcagtctctccagcttttcctgtgtctctgtctctccccatctctgtctctccatacccagtccccatgtctctccatctccatgtctccccatctcttctctctccccatctctctcatctctttctttctttctctttttctttctctctctctctctctctctctctctctctcgctttctttcctctctttctctgtctctctctctctctctcctttctttctttctgacggagtctcactctgtcgccaggctggagtgtagtggggagatcttggctcagtgcaacctctgcctcccgggttcaagcgattctcctgcttcagcctcccgaatagctgggactacaggcgcgcaccaccatgcccggctaattttttgtattttagtagagacaggatttcatcatgttgggctggatagtctcgatctcctgacctcgtgatcggcccgcctcggcctcctaaagtgctgggattacactgcgctcggcctctcatctgtttctttccccatccttctgtctctcaatctctccagctttctccggccctcccagtgtcttcatctctccccatttctgtctctccccaccaggtctccctatctcttcccatctctctccgcatctctgggtctcccatctctggtctctccctgtctctcttttttctctccccatttctctgtctctccccatctccgtctctctcatctctggtctctctcatctctggtctctccctgtctctcctgtctttttccctccccatttctctgtctctccccatcccggtctccccgtctctgtcggcccgggtgggtccgggtgggtccgggacggcccggcccgggcgccgcggcgaacaatgccccattcacgcgggccgccggcgccatggcaacgcgcccgccccgccctccctgcgcgcgggccgcgcgtgccaagaggatgccatggttacgtcaggcgcgtgcccgtcgcgcgcgccgccgtcccgcgcgctcttgcagggaggggccaggccagcagggggcgcgcggcagtagcctctgcccggagtcagaaggggcggtcttccccacttcaaggggccttcagctgcttagtgcctcagtttccccatctgtaaaacgggggcgatgggcaaagctagatcggagtgtgaaagagacagaaggaggaagggagaaaggggaagaaggcggcggtgctccttggggatggttgtgtgtctgagtttgcatgagtcagtgggtatatgtgtgtgcgaatttgtgggtccatgtttgcgcgcttgtgtgggtgttttatgagaagttgagaagtggttggttgtaatttgggggtgacttggggcccatgtgtttggaagtgtgtgtgtttgtatttgcacacttgtgtgtgatggtattagccggtatcatttgtgtgtgataatgtgtccgtgtgtttgtggtcctgtgattgtgcaccccatgtttgcctgtctggtgtgtggtgtgtatagtgggtgtctgtggtttgggtgtggttgtgggttcggggaactatgtgtcccatgtttgcatgtctggggtgtgtgtgtgtgtgtgtgtgtgtggtgggtgtctataatttgggtgtggttgtgagttcatgtaactgaaccccatgtctgaatgtctggtgtgtgtatgtgtatgatgggtgtctgtggtttgggtgtggtcgtatggttgtgagttcatgtgactgtgcaccatgtttgcatgtctggtgtgtgtgtgtgtgtgtgtggtgggtgtctatggtttggatgtggtgtgtgtggctgtgtttgcatgcctggtgagtgtgtgtatgggtgtatgtgtgtctgtgatggtggatggctgtgttgttgggtgtgattgtgagtttgtgtgaatgttgtttgcgtgtcacggggcctgtgttcacaaactcacgtgtgcttctgtgtggaactgggtgtgggttctgaggacttcggggacctggccaagtctccctcccccacctgggggcctcctggcacggaagggggtgaccagctgcctgggacctccgactccccacaggttcaggagagccccagctgatgaatattcatgaggtgggggggctggcacccactgccaacagctgcgtgtccattagtccccctccctgctcttcctgtactgactgcaaaggggagggggggtgtcggcgtgtgtctgtccctgtttccaagactcgggggcgggggtgtcctagggacaatcgtgggggcccagtcagcatgcctggctgcttgtgtggacggctaaggggctgtctcaatgttgtgacaggcactgggagagtgactgttgtgtgacaggttgtccttgtaatcgtggtgaggctgtcacccacggttgcattgtagctccttggtctggggactgtgggcgttgtgtggcagcgtgagtgagctgtgtacctgtcacctgcaacagggagactgtgagtgtgtgctattcgagtgactgtgaccagtggtctgtacctactggctgcctgctctgtgacacagtgacaacaagggtgtgttattgtgctattggaataactgggttggttcaaaccttgatcaagggacagctgcggtctgcaccctggggaggcagtggtcagagctgcttttcctccttgtgactgggtggggcggtgactccgtgtggccacgtggctagcacagctgcagggacatgcggactgagtatatcagtgtgcctctgctggccagtgtgacgttgatgtggtgtgagggtcagagtgtcggggttcctgggaggatgtgtgagaccgtgcagctgaggtgtgtgtcaccagaattgtcaagggtgtgaccgtagttcttcatgtgacagcgtggctgagggtgtgatggtgttgctgtgcaggtgacactgtggcagtgaatgcgtggatctttgtgtggttgaaggtgtgacagtgattgtgtttgatgatctgaaccaaagggctatgactgtcctaccctcacttccaggctgcacagggagagctgggtgctggagtgagggggctcctggcatgggattggcagctgcctcgccaggggccgcacgtcagcctgagactgggacacctggagatctgatgccagctggggcacagaacctcctccctccatcttcccctccataggctgggtttggaggagtggcctctagatgcagctgggaccagcagggggtggggcgggatgtgcttctctggtctaggggactctggcctctggctgggtggccctggaggccccaggttcccagcatacgtggcttggccaggaactcagtgtggccgactcagcccctctgatacccacaccctgggacggctgagcattgctggcggccccagcggcagcgcacagaggctcctttcacgagccagggccaggtttccagggcgggtgggtctccggctggcccgctgcaaatgaaacgtttccccagctccttccctttcgtctccagatgagcgacggccacaggaggccctggccaggctgtgctgcctaggcaagtgtgagtgtgtgtctgtgtttccctgtgtgtgtgcacgatctagatatctttgtgtgactttttgtttcttttttattttttttcaagacagagtctcactctgtcacccaggctggagtgcagtggcacgatctcagctcactgcaatctccgcctcccaggttcaagtgattctcctgcctcagcctcccaaatagctgggattgcaggtgtgcgccaccatgccctgctaatttttgtatttttagtagagatggggttttgccatgttggctaagctggtctcaaactcctgacctcaggtgatccacccatctcagcctcccaaagtgctgggattacaggtgtgagccactgcgcccggcctgtttctttttttgagataggatctcactctgttgcccaggctggaatgctcactgcagcctcaacctcccggactcaagtgaccctcccaccagattagctgggaccacagatgcacactctatgcctggagaatttataaattttttgtagagacacggtctcgctatgttgcccaggctggtcttgaacccctgggctcaaccgatccacccgcctcggcctcccaaggtgctgggattataggcgtgagccacggcgcctggcctttggtgactttttgtgtgctacatctgtggatgattttgagaacatcaacgtgtgtgacccatcgggtacatgcagtcctgtgtgagatttttgtgaacctgtgtgacttagtgtggcctgtgtgtacctgtgtaactcagcatgagattctgggagtccatgtgactgtgcgtctgtgtgtgtctttgcaacgcggtgtattgtctgggtctctatggggatctatgtgatggtgaaggtctttgtgtgtatgacctggctgtcactctgtgggtggctctgggaaggcctgtgtgggatttttggcgtgactgtgtgtgtttgtatgtctgtgtgatattctagaagggtgtgtgatggtatctgggtgaccctgtgtctgtgtgtcattctggattttatctgtgggaacagaggaggagaggaaaaggggggaggggagagggaaggagaagggtctgtatttctgtgtgtctgagtgtgcctgtgtatgtttgggtgcccctgagtgagtgtgatagtgagagtctggtgtctgcattcacatgtgtgtggtgtggttgtgggtgtccctcgaggtgtgcctcagaagcaacgacctgtaactccccaaattgagtccctaataggggcttctagaccaccctggaaggcagacagtgatttcaaggctaggaccccaggcccggagcacagatcatgcctaccacgctaagtacggggacatcaggccctcttggtgggagtggggatatccaggttctactgggggtgcctagagcacccttttctcccagcctggcagcacccatggcctggctccctgcctatgctacatgccagatgtttgcccacctcacccaagagccctgctcagttgccaagcagccctggagcctcacgttgcccggccccacattctgtgccccagaatgtggctgccagagcccagatgtttcagccctcccctcacccacatccacactgcccgcagcatcctggccaggtagtgccatgggcctggctgccgcttcctgctcctcgtcctaccccaacacacctgcatggtaggaacgcacctgctgctagccacagccaggtgggcagcctggcagggaggaatgtgggggattccagctgtggcatgccagctgtgcccagccccctggcggcaccctcctcccgtgagatttctcgaaggccaggtgtatcctaatacttgggccccggggagggggagagagggaggggcagcgctgccctctctggcagtccctctgccttcccataaattcttcccattgcagttgtggaggggagcagagtgagggagtgtgtgtgtgtgtgtgtgtgtgtgtgtgtgtgtgtgtaggagggtgctgtcagtgtagaggaggggtgctgaatgtggggaaagaactttgaatgaggatgtgtgtgtgagtgtgagagtgagtgtcttgtctgtgtgagtgtggatgtggtgtgacagttgtgtttgaatacaaggaagtgtgtgcgtgtgtggcgtgtacatggggagggtgttatgggaggagtatgtgtatacaaatggaagtgtatgtgtgttgtgtgtgtttttgtgtgtgaatggagggatgagttgtgtgtgtgaatgaataataggtgttctggtgtgatactgagtgtcatagagtccgtgactgtgtgtgtgaaggatgtgtgtgtgtgcacctttggaagtctggtgtcctgtgtgtatgaatggaaggacaagtttgtgtttgtgaatgaaggatgagtgttgtgtgggtgtgaatgaagggtgtgttatgtgtgtaaaaatgaaggagagatggccgggcgcagtggctcacgcctgtaatcccatcactttgggaggctgagacaggcggatcacaagatcaggagattgagaccatcctggctaacatggtgaaaccccctctctactaaaaatacaaaaacaaaattagctgggcgtggtggtgggcgcctgtagtcccagctgctcgggaggctgaggcaggagaatggtgtgaacccgggaggcggagcttacactgagccaagatcgcaccactgcactccagcccgggtgacaagtgagactccgtctcaaaaaaaaaaaaaagtaggagagatatgtgtgtggatgaaggctgggtgtcgtgtatatgtggatgaaggatgggtgttgtgtgtgtacataaggaaggctgggtgttgtgtgtgtggatgaaggctggggtgtgtgcgcgcgtgtatggaaggctgggtgttgtgtgtgtgcgtatggaaggctgggggtgtgtgtgtgcgtatggaaggctggggggtgtgtgtgtgcgtatggaaggctggggtgtgtgtgtgtgcgtatggaaggttgggtgttgtgtgtgtgcgtatggaaggctgggtgttgtgtgtgtgcgtatggaaggctggggggtgtgtgtgcgcgtatggaaggctgggtgttgtgtgtgtgcgtatggaaggctggttgttgtatgtgtgcaaatggaaggatgggtgttgtgtgtgtgcgtatggaaggctgggtgttgtatgtgtgcgtatggaaggatgggtgttgtgtgtgtgcgtatggaaggatgggtgttgtgtgtgtggatgaaggatgggcgttgtgtgtgtgcatgtgaaaggatgggcgtttgtgcatatggaaggctgggtgttttgtgtgtgcatatgaaaggctgggggtgtgtgtgtgcatatggaaggctgggtgttgtgtgtgtgcgtatggaaggctgggtgttgtgtgtgtgtgtatggaaggctgggggtgtgtgtgtgcatatggaaggctggggtgtgtttgtgtgcgaatgagagcctaggtctgggccaggtgcaaggaccaggaaggccatgagggaccatcagcccaggagcccggggcctgggggctggtggtcacggctggagcacaggctggcaggtggggtagggcagccagagttggggtttctgagccatgtgccccctcacagccatttgcaggggggtgggcagggtctgcctggctctcaagatcctccaagcccccagctccatgaagggtctcacacctccccgggccctttcccacagcttccccctcagtccccccacagacccacactgctctgctgtcctcttcacccaggacccccagatcccccagacattgcctctgctcctttccacagccatctgagcccccgccctgcctccatcccccatcactccctcaaagcccgcatgtccccaactccttctcccagacatcccagcctctctagggcccctcaaaagcccccagacgcttttccgttcatcccttctgccttttccagctcccctcccctccctacacctggacccccattctgtcctctacccctttccagaaccatccattcatcggcccaacccccttgatccccaaatccctttctggcccttcctccagccccttaccgctcccagccccccacggggccccgccccttcccctctgcgcccccacccccacccccgctccgcttccaacccctcccccgtccgccccttggagccccctccctcttctggggcagcggtggtgtggaggcaggcagccgcagcactcctgaaactttaaacggtgttaaaagtttctgtttacgagaaacccttgaatttttaaggacatatcgattccctgctccacagccttgcctcggtggcgtggcggcctcaggcacagtggggaggcccagactggagggagccggggttccgaggcccccaagcaccgaatgacagatacacgcctacccagacacactctcaggcacacagggacgcgatccctgatacactcacacacacacagctagtcacacacagacatggcctgacacagacacacatatcaggacacacagagacccctccctgacactgacacacgcatacaccagtgtgtgtatacacacaccgacatggcctgacacacacacagactcacatctctgacacaggtttacattgacccccctccctgacacacacacacccacccacacacacccacccacacacacatacactcctagttacacacactgatatggcctcacagacacacacattgacatggcctgacacacacagactcacatctctgatacaggttcacagggactcccccttccctggcacacacacatacacacacctagtcacatacactaacatggcctcacatagacacacacacacgacctgacacacacagacacatgtatctggacacacagagacctcctccctcatacacagacacacacaccgacatggcctcgctctcgctctctctcacacacacaaacatgcacacacgcatggctacacacactctctggcatggcctgacacacacaggctcacatccttgtcacacagagcccccatgtcctgacagccctgatccctgacactcctgagcacctgtgtacacaccctggtacacaaagatcctcatcaccgccctaggtccacatagcaaaacacacacctagtgacacccattgacactttctgccccacagaccctgatcacaaacagggctggctatgcccattgggctcttgcaagcaggtcccagacccactgggacccttgcacagtcactcacgtgatcacacttcaagacacacacacacacagacccatatacactgacactgcactgttgtccaggctggagtgcagtggcgcgatcatggctcactgcaacctccgccccctgagctcaagccatccttccacctcagcttttggagtagctgagaccacaggcacgcaccaccacgcctggcttttttttttttttttttttttttgtattttttgtagagatggaatctcatcatgttgccaagctggtcttgaactcctgacctcaagcaatctgcccatttcagactcctgaagtgctgggattataggcatgagccaccgcatccggcctacactgacactttttttttttgagacggagtctcgctctgtcgcccaggctgaagtgcagtggcgtgatctcggctcactgcaagctccgcctcccgggttcacgccattctcctgcctcagcctcccaagtagctgggattacaggcgcccgccaccatgcctggctaatgttttgtatttttagtagagacggggtttcaccgtgttagccatgatggtctcgatctcctgaccacccgcctcggcctcccaaagtgctgggattacaggtgtgagccaccgtgcccggctggtgtttgcttgcttgcttgcttgcttttctttttctttctttttcttttctttctttcttcctttctctttttctttttcttttctttctttctttcctttcttccttccttcctttccttccctcctcttccttctttctttctttcctttgtttctttctctctctctctctttttctttttttcttttcttttttttgagatagagccttgctctgttgctcagtctggagtgcagtggttcgatctcggctcaccgcaacctctgcctcctaggttcaagcaattctgcctcagcctcctgagtagctgggattataggcgcctgctaccatgcccggctaaattttatatttttagtagagatggggtttcaccatgttggtgagtctggtctcgagctcctgacctcaggtgatctgcctgcctcggcctcccaaggtgctgggattataggcatgagccaccacgcctggccatggtctttattttcttcccccaccatgtccccagtgcttggtataggaccgggcaggcaccttctctgcctcatgacaccttaagtacaaagtcagacccagtctctgctgcacaacatacagatccacacaaaaagattcttgctttgttttttaaaatttttattatttatttatttatttatttatttatttatttatttatagatggagtgtcgttctgtcaccaggcaggagtgcagtggcgcgatctcagctcgctgcaacttccgcctcctgagttcaagtgatctccggcctcagcctcccgagtagctgggactacaggtacacgccaccacacccagctaatttttgtatttttagtagagacggggtttcaccatgttggccatgatggtctcgatctcttgacctcatgatctgcctgccttggcctcccaaagtgctgggattacaggcgtgagctctccctttctctctctttcgttttgagacagagtcttgctctgttccccaggctggagtgcagtggtatggtcttggcttactgcagcctctgcctcccaggttcaagcgattctcctgcctcagcctccctagtagctgggattacaggcatcccaccacgcccagctaagttttttatttttagtagagacagggtttcaccatattggccaggctggtctcaaactcctgacctcaggtgatccacccgcttcggcctcccaaattgctgggattataggtatgagccaccacgcccagccagactcttgcacctatcatgacctgcatttcttcagtgtccccggaagacaccagacccatctagacacccacagacacactgcctgccacacagcctaatacagtattgtgacaaggagcatatcgtttctgggacatttacacacatactcacgtacacatgcatacttttgtgcctgcttgcaagagcccaatgggcacagccaaccctgtgtgcgtgcgcaccccccgccctgggcactgacaccccctttaacagacaatgcatagctgagaattgccacagctttttggcccaagagagcaagaaggtgctggttgcacctggcagcaggcgggtgttttgtctcagcaggagctgcctgggggctgtaggcactgcctccccacccaccctgagggttaccagagggcttcctctccccttgctccagggtccccagcactacctctccccccaggcctttatgttctgaaaatgaggagtcagggcccgcaagaggggctggaacctcaccaaagtgtgtgtgtgtgtgtgtacatgtacggaggccctgatgcccaattctgtccctgacagctgagctgtgggtctcctgctatatttgcctatgtcgatgatcagggccacattacaagtgtgttggggggggggcacgtaagggacatgggtgtatgtgtgtgatccctgtgtgcatggctagatgattctcccaggggggttgtcagccgcctgggcatcagttggtcagtgtgtccaaggcctgtgggtacatctgggcaacccagtgtgtgtgtgtgtgtgtgtgtctgtgtgttgtgttgtgacagccagtgttgctttgtatctgtgacgctgtgtatctctttgtattggggtcctttgcattcacttccaggtgtttggtgtgtgtttatgtgacattgtgtatcttcccttcattagtgtcatcttatttatttagttattttttttcagacagggtcttgctctgtcacccaggttggagtgcaatggcactatcatggctcactgcacccttgacctccccgggctcaagggatccccccacttcagcctcctaagtagctgggaccacaggcatccaccaccacacccagctaatttttgtatttttggtagagaggggttttgccatgttgtccaggctggtcttgaactcctgagctcaagcaatccactggcctcggcctctcaatcatcagtgtcattctgtacatcggggtgtactgccacaactgccagtgtgttctggcactgcgatgtgtgtgtgttgtgtatgtgtctgcgtgtaggaattgtgtgtctggaaggtgtcagcgtgtggctgtgtgatcttgcatgtgtctgtgttctgcaggaacatgcgtcagtgtgtgtgcatcagtgtgcatctctatgtgtcatgcactggtgtgtcttcgtgtatatcagtgtgtgtctacgtgacgcctgctttggtgtatgtctatacgcggttccttgttgtgtgcctggataccatggtgggacggtgcatgtcagagcgtgggtcgtgggtgttttcccagactgctgtgtgtgtgtgcccgtgtgtaggggttgtgtgtctgtgccttgtgtgcactggtgtccgagtgtgctttgtgttcgaaggcggaacgtgtggccaggcgttctggacgtgacatgtgtggcggggtccgagtcccgctgcgtgtcagcgtgtgtctgcgctggaacgcgggccagcacgtgtcagggcggccgcgtcggtgtgcgcccccgcgcgcgcgtgtgcgtgtgttcgtgtgtgtgtgtgcatgtgtgtgcttgtgtgtgtgcgccggccgccgctcccccgccctgcccgcccctccccgcgcccctcctcccgcccgcgccgcccgcccgctccctctccccggagtgcgccgcttccaaactttgtctaaactttcactttcacagcgcggcggctgcggcggcggcggcggcgggcgagggtgaccggccgagcggcggcggcatggagtagacgcgcggcggcagcggcggcggcggcggacgcgagaggcagcggcgagcgcggcggcggcggcggcagcggcggccccggagccggcggggccgagcttgcgagcggcgagcgcggagcggcgccgggccgagcgcggggccgcgggccgggcgggcgcagcgcggcggaggccggaggagccgagccggagcccgagcccgagcgcggccgccgcctgccgggcctcccctcgccgcggccggccgccgcgctcccgcccgggcgcccagctatgtactccccgtactgcctcacccaggtaccggccgccgcccccgcgcgaccgggggaggggagcgggcgcgggaggccggccggcggcgcgggcggaggggacgcgcggcggccgggaagggggggccgagagcccgcgggccgccgaggggtgcaggctgtgccgcggggagcccaggcacgcgtgcgggcgtcaccgtgcgcgtgcgaccctggccaccgggcggactccttttgggggttccgggggtggccagctgcgtcgtggcgctgcccgtggagcgcaggcgggagtgcgtgtacgtgtgtgtgtgtgtgtgtgtgtgtgtgtgcgcgctcgactggggtgcgatgggcagcgggactccggctgacctgtgggctactgtagcgcgcacccgggcagcgtggtcgctggcagtgtttgcggggttgacagagtggcaagagggtggtcccgagggcgcagaggggacactgggtcccgcgacgcttcctggggagggcgcagcggttcccgagggtggcagtggccggcgtgcgtggcggcggcccttgcgtgcggccggggtgcctggggtgggccgagcggcccgggcgtctccccaaagtctttgtttaggcctcacatgggagcggggctaagaaaatggcggggctcccaaatttcggaggggcaggggaggggagaggggggcgggcgcgctgccagcggtggccgcgcctctccgaccccggacgtcgcagcctctgcccccccacccccaaactttcctcggcgcaaactttctggccccagcgacccgggctgctgcggagtggacccggcaggcctggggaatcccgtcccgtcgcctggaggcgggaggggcgggaggcagccgtggacacagccgacagtgctgcggccacaccgtcgggtcagcctcgggcacaacagcgccgaccttggcgcgttgctagagcgcgtcccgcctgcagcgaagttccctgcgcggcgcacggctgcggcaaaagcttcgaggatgcctgtcgggccacccaactctccctgggctgtggcctgaggctctaagagggcacagaagctgcccagagtcccacagtggccctgacagcgttgcctgcagggccaagccacagctggtaacagtctccgaagaggggacatctaggggctgcttagccctgctgccagccaggcctgcatgtgggggttctctaggccaggccctaattgtcccctctgcccagcctgatccttgtcagccatgtgccaagtgtgtccacagcttacagtggcagtccacatgggtatggctcctactttgtctgggtcctaccgggagtgtgcagtggtgtcaaggggcgaggggtttgtcggggtgtgtgtcagctgtggctacaccacactcctgtatgcacaggtgagagtgtatgcaagtgtgaatcaatctagagtctgtgtgtagcccctgtgggccggccatgggcaggcctgcgtggcatggccgtgtgtgtggcccagggagcgggttttcctgtagaaagcaggcccaagtacgtgttggcgagggcgcaccggcatgcatacatgttgcagtgtgcatgcaggtgtgagcaggcaccctgagcaccatggcagtgtggggaacccccacatctgcacctccagttccacggccactccatgttgggcgcccctcacaacaactgcctacccagcggtgtctgagctgggcctctttggtgctacacttggctgggctgtgtggccgatgtttggggcctagtggaaccaagaccccacgctcaagcagccccttgcccaccaggctgccagcccggcctcccatgccaagcacgccagacatctgagcctgctcccccatggcttgggtgagacaccagcccctcagatttcacagcaccctgggagagaaaatgcctgtggatacgccggtgacatggctaggaaggggctggggcggctgcgagacccagggcgatggccggtgcttggctctgtgtgattgtaggcccaggttacgacagttccagtgtgccaggatggctggagaggggagtgggcatggtgtctccaggctgccagcccttcatggtgggcagggaaacccttcagctctgggcaggtggctgctgtcggctggtcagtggggtctggcctgcccctccctaacaatcacatctctgtttttacaaatctttctgcttccatggtttgccccgctggtctctgtttttatgacaacctctttcctttgctgtctttttctcggtctgtttttatcggtctctggtgtattctgcccttttccatctctctttctccatctctgtccttttgtatgtctctgactgtctctgtctctgattccagttttggccccatctctgctcccccctccactggcgtctcggactctctctctctctgtctctctggcctgcctctctctctttccctctctctctctcccttttctttttttcaaaccagaattggcttcgattttaaagtcaataaatgattgagcaggaacgagcttggagcagcggggccctggcggggaaaggtactgtgggcgagggggaagggcggggggaaaaatctccttctagaaaaagcatcgaaattcagggcggccgggtggggcggttcctggagctgctggagtccattgtagccacagtcctgagtctcaggcggagagaggggtggggggtggatggatggacccccatccccatcccaaccctgccaagaaacagagacacaaccaggatgtgaactcacgtacaccaccatcaccgccaagatggggatgtaagtgtcctgttcacaccgatgtccagacccacgaccatcgacgagcctacagacctacggacacaggaaaccgacgacttgtgttcacactgtcacacacacccattaacacacacgcacctcttgaaatgggacacgtatattggtgtaggcttagcgacacagcagtacctctttgacgcacgtatggacacaggaaactgtggacttgtgttcacaaccacccccagcgcacacataaacactcacaaacccctcgagatgatacagatagcgacgaaggcacatggagaccacgacacctcccagactcatggagccctgagcacatgcttggatacaggtagacacaaatgtgtgttcacccccacacatgctcacatggacccaaggacggacaggcggatggatggatacacatctttacacagagacataatgcagttggctcgctcaggtgtgtacacaaataacttttctttttctattttttttttttttgagacggagccttgctctgtcgcccaggttggagtgcagtggcgtgatctcggctcactgtaacctctgcctcccgggttcaagcaattctctgcctcagcttcccgagtagctgggattacaggtgcccgccaccacgcccgggtaatttctgtattttttagtgaagatggggtttcaccatcttggcccggctggtcttgaacttctgacctcgtgatccacctgcctcggcctcccaaagtgctgggattacaggcatgagccactgcacccggccacaaataccttttcaaacacacacacacacacacacacacacacaaatatgcaccaatgcgtgcttccccctccttgccacagggataaaaaggcaaacatgccgacatttgctgacacacacaaagacatacatggccgcacacacggatacacccgctctcagacacgcagcgacctacgcccattttcctggccatacaagcagccgaacgttcctgtacttctgtatctgcatagctcccccaacactccttccatgggagggggatggctggggcttccctgatgcccccttcccccagctttctctctgggtcactctggccacccctctgtccctgcgaagctatagctctctgtccctgctccggcctggtgccctgttttcatggcacttggcattttctctccggctctggccctgcctgattcatgcccactgctggggtgggaggtgtgcccaggtgtgggccgggatggggtagctcatgagatgagctggggctccgtgagatgttttgatgctgggccgagctcagagccgagggctctgccgggaacagggtgctccagtctctctagggcctggaatgtcttgtgtagcctcaagagctcccagacggaggctgcgggagcggagtcaagggctaggctttgccgtcagacagaaatgggttcgagctccagctctacatgttctaatcttgcgacctgaagcacaggattttcctggcctgtaaaatgggcaaaaaccagtgtctatctcttgggctgtacttaggttcaatgtggtgcctggcacatagtgtgtgctccataaatggtaattgttgccaattgttggttgtcaacctcccagaccctcccagctgagagagggatgcctctgaggggtagaagacaggatcgagcacctcccaaccatagatatccaagtggactgcctggaggaggaggaggcaagaggagagtttggaaggatgagagtttgcacatggcccagctcttttacctttggatgggggcctgtaggccaagcagagggtggcacaacttcaagataggggagagatggtgggggagagtggggggcaggaggggagagacgaggcctccactgttccatgaggaccagataccctggttgggggccctgagtcctggtataagagtatgtgtgcacgcattcatccaaatgtatgtgggacaaagagacccggtgcatctagatgatgacttcagggacgtccccaagctccagaactttctgtgtctgcacctgggcgttgtcacctggacccgccatggagacaggacatatgtgcaggaccctatggtgggcacttggctggatcagggcacattgcgggtgggagcaatgctgggtgtttggccgtggcgccgtggctgtgggcaaaatgcccccgtggttggtgtgttgactgccgtcctccccatctaacccacagggagcctggccttttaaatctgctgagatattgtctcccccacccccatgaagctggaatctggggacttgctggaccagagaggtaggggaggctgggcactttctccaacacggtgctgagaatgggccttctgtcccctccctcccagctggggtggggaaaaggaggggggtgtcttaattttcttgcccccaaagccctggatgtgggggcaagtgggccaggaggacagctgtgagccactatctgggttctcccagatcggtgtgcatgttaatcggcatgtcaggcctcagagccaccattttcccgaggatgtctgtgtggcagcgtgtgtctgcccgggtccctctccatgcctctccatgtctcccagcgtccatcactgggtgctacctgcatgtgactccacggatcatcgcacgccctgtctcttgtgtatttggtagtgggggtcggggagcgtgccaccatgcgtgtcagtgtgccggatgtagtctctgtgtcacggtggcgctgcgcacgtcaacgggtattggtgtaccggtcaccatctttgtatctgcgctttgtatctggggtgacagtgtcccagcgacatgcgtcacatctacagcagtgtttttctgggtgtctgtgcgtcacggcaaagagtgtatccgtgtgtctcacacacgtgttggcctgtccgtgtcaacttgtgtccacatacgtgtcaacgcacgtgtctccagtgtcatcaccctcatatcactgtgcctcctgagcttgtccccgtgacaatcactgtgggtctcaccccacgggcgcctctcctgggcattcccttggcctccgagcaccatgtgagatgcctgctatggcggccgggcaagcggctgggagcgggctggctgctcagtcccttcccatgaggttgagcggccgcagtggccttgctgggggccccgcccgtgcccctggcctggcgtggacagaagcccgttgtgcggcagcgaggtgcgggcgtgtgttcgggccgcccacaggcctccctctgtctgcccggcgcacattgatcttggcttctgcctgtgtccgttctagcctggccagctgggtgtccggctgtctccgtgggcctgagcccactatccccgctgcccccacagccaggcaggccctgggccccacacccctgggccacccgccatccctccgaggctctgagggcgcggatttggaaactgaggtccccccttctttccccctttctctctctctctttcctccctctctcctcccctcctcccctcctcccgctccctctctccctctctctctcctcctgccaaacgcgtcttggctccgtctgaatatctctcctcctcgatttttggctccagctctgggcgcgttcactaaaggaagaagggctagctccccaacccccccttcctcaccacctcccccctcccgaggagcccctctgagggcgggagtggcctcgtgcaggggcctgggccccctgagtgggcttggccaggggggcacaggcctggcgggtgagggaacagggtggacagggcctggcagccagagggaggcaatgggcagggtgactgagctgcccggcggggcgggcgggcagggaggggtcgggggcacggagctggggtgtctggcttctggtggggctggcaggcctctgtgaggcgcagctgtgcccagaactccaagttgcgtttgccaccactaccgatgtggctgcgccagccagggaggggaggcgggtagcgggcactgcggcgctctgcagccaatcggaagccggggttgcactggggagctctccccccactgggccccaccctgaggggagccgggggtggtggccagcagtgggcagggggcagtgcccaccaccatcgccaaggaccctgccccctcagctgaagctcagtgccagccttcctggcacagatcgggcaagagcggggatctgtctgtccccacctgaatctgtgtgagccaagctggaggaaaggacagcatggaggtgcacccgacccccctgggccttttagtccaaggcaggcaggagctagggatgggttccaaattatccaggtggttccgtccaaatatcggcttcggtcgaatcatcttggggagttgggggggggtttattccgggtccatctcacacaaagtcacacactctcactggcacatgcgggcacaaagaatcacgctgacacacactggcatgctgcacctccctcaatcaaacagacacaggcgtccccatacaaagaatcttgccctcactcacagacaccttgaggcacccggccacacccgaacacatcgatgcggcattacacactcagggacgtgcatgtgggtgcagacacacgggacacgcgcagtcacacgatcacatgccatgaagcacacagcacagacacaggctctgccaccgtcaaatgcagccccacaggcacagctagaaacacacagcacacacactcagtcataatgtcagtgcccaaaacacacacatgagcaccgatacacccgcacatgccaccaagcacacaggtacatgcacatgcatgcaataacacgctctcagacacacaaaacaccccacacactccctaacccagtgtcacccaccaggagtgatttcacccattgggaaatgtctggaaacattttttttttttagagacagactgtcatctgtagcccaggctggagcacagtggtgcgatctcggctcactgcagccctgacctcccaagctcaaacgatctacccatctcagcctcctgagtagcagggaatacaggtgcatgccaccacacctggctaatttttaaatttttttgtagagacagagtctggttatgttgcccaggctggtcttgaattcctgggctcaagcagttctcccgcttcaccctcccaagtagctgggactacagccgagcaccaccatacccagctaatttttaaatttttagtaaagatgaagtctggctttgttgcccaggctggttttgaattcctgggctcaggtgatcctcccgcctcggcctcccaaggtgctgggagccatgagccaccatgcccaacctggaatcatttttggttgtcacacttgtggagggggtgctatttagtgagtggagacccaggatgctgctcagtcccctacaatggaacccctcaaccctcgccgaccacaaagaatgatccagccccaaatgtcagtagtgccaaggttggaaaccctgccatgcatccccagatacacagtaacacacacaggcacagctaacccttgacactcattacacatgcacccacatacacagtcacacccaaacaagacgccagctgacagtgtcacacacacacactctccctcactaggacccaggcattgtcgcatatataccccatttcccctgccaaacccaggcacagtcggcgtgccatgtacacagtccagtgttaccccagcacacagggacgagagccacacccccacacatattcgcacctgggccacacctggcagtggttggaaatggtgcctgagagctgagacctgccctggtggcacctcccctctgcttgtcagccacaaccagctgtctttgcgcagcagctacagccaccccagcttctcaggatagaattgggagccccaaatccctgccctggtttgtagaagcctggggtgagacaaagcctggaaaaaccacatgcccatccctgcccaggacactcgcagtcttctagactccgtggtcgagggctccaccctcacctccttgctcctggcagccaccgagagaagggatggggacaaagctaggttctttttttttttttttttaaacagtctcactctgttgcccaggctagagtgtagtggtgcaatctcagctcactgcaaccttggcctcccaggctcaagcaattctcatgcctcagcctcccgagtagctgggattacagatgtgcactatcacacctggctaatttttgtatttttagtagagacagggtttctccatgttggccagactggtctcaaactcctggcctcaagtgatccgcccgcctcggcctcccaaagtgctgggattacaggcgtgagccactgtgcctggccaacaaagctaagttctgagactcctgtcctccgtggggctgtctcactaatcctttggcctttgactccccagttctgaccccagagaaagaagagacagcggtcagcagaatggtagaagaagataggataatagcaaaataaatgtttgtcctaaaaatcgtagcaacagctaatgtgaactgtgtgcttgctgcgttgcacccttgctaagtgccttcccagcttgtcttcttgaatcctgtgttcagcaggtactgttattaggagagtggggcctgcagagccagcttcctgggtttgactcctggctctgccactcactagctgtgtaacttcaggcaagttgcttaacctctctgggtctcaatttctgtatctaggaagcagggctgtggtaaggatctgaggagttggttcacagcacacgctttaaaactgtgcttgatgtgaaaacctgctttgattttatggatgaaaaaccaagactcagtagaggtatccagtgctagggtcaagggcggggagctctttcttcaagatcgtcaccaccctaaatcctgccgatgggacaaaattgcagcttgttctctggcctttcccaaatttcaaaatgggtctgcacacccccacgcccccatttgaaacgtgccctagtggttggcccttgaacctttcttaccactctgacctttggatcttcttccatccaaggctcagaataaaggtggatggtggtctcaccccctctgcacccctgctggccaggcttgccctcacccccgcaggtccaaacatcctctcccacaccttgctgggcacccagccggagctcaaatgctgggggtgcagccgggagcctgtgcattccttcgacaaatatttaccaagcacctcctgggtgccaggctctgttttaggccccgggggctcggcagggagcaaaatctgcaaagatgccagccccggtgggagggcagactgtgaatctgataaacaagggagtgtccagtccttgagatggcgctaggtgctgtgggaagaacagagctggccgggccctcgggagtgctgggcagctgtggttttagcagaggtgggcacggagacctcatggtgagatgatgattttgaacgctgccttgctatagctcaagtgcagcccaccaggcccctttctctctccagggggcagactggaggtcaagggtgtgtggctcagcatggcatgcccatcatttgcccagaccatgttgcctgtcatttcttcaatctgagctcatctattatccatatttgtggatatgccatacggtgcccgcccaaaatctggggacaagatggccgaggcctttcctttacagaaactggggcttgatgggcactgggtattcgcaaccctgctgctctgagctgggggatggggcaggggcagctggtggcccagagtggcacttccacctgggcccctcaatttagctcccccggggcgggctgggtttatttttaccccagcctgtcaccctggcagtaccaggctgcgccatctttgcagggtcttggggatctgcccacagcttgggggtatcaggctttgtctgttgggttccccaactcccaccagggccccagattctctccacccccaaagctccaggcttgagagctctgggctggggcccggcggggtcggcactgcaggctggcaaccaccgtgcccagcctggtggcatttggtttggcgccctgcctgcctgccacccccaccccatgcccgggcagagccgagcggctgctgctgccagtctccatttcgaagcttgaggtgggggtggggaagtgctgggcgcctccaggcccctgcttgtcccgtgccacctggggatcatcccccatgcctgttccctggaagggccgggctgcctcttccgctgcccctttgcagcctggagctcagcaaggatgcccgcctggcttccatcttcccggttcgctccctcccttcctccccctctcgcctgcttgcctgtaatggctcaccatttttggcatctcttccccctccccccccataggcgccaacctcacttccaaacccgccgccatcgttggctctctggccttctctgccgcctggggctgggacctggaaatgggaatttgggggtgggggccgggcctgtggacatcaggggctttctgcgtgctcgtgtgtatctctggggttggggggcacatgttctaagccagctcgctccatccaccccttcatttgcctcaagcttgcagagcaggactgcagcaaaagtgacgaccctcccatttctgattgccctgcacctggtattggcatctgggccaccagggggctagggtgggcatctctgcccaagcccaggccctggcatggcaagggcaaggcttcatctgtggtgtgccccaacctctccctttccctaagttccccccaaggttccaagattcctgcttccactccccagagctggagtgggggaaccaagcctcgccttcggtacttgtgtccccagatggggcaagggacttcggaggaaccggtttaatgccctcccccccaccccacacccgctgcccgcgcctctctcggcactaaacaaagtttgctaagtaacttcaaatgttatttgaggacggcctggcctcaacccaaggcggccctgtggaaacttgtttttcgctgccgaggctgcaagtatcaaagacacactttcggtgggggggtgctccaataccactcccccctctgtggcaggggctggccctgaatggacacacagacacacagagcagacacacataggcctgtgcctacagagacacagacatcatcctgtggcctaaacaccaggtacagctgcaggacagccttggagcatggtacacataatacatacaacaaacacacatgttgacaagttaaggaggtaggagggggtgacagggcactacccctcagcccatggagtcctgggattcttccagctggtggggtttcgccatgttgggaaaaacgtacggctccgatccttggggtcctgtattctcatgactccagggcttgagggggtgctgggatgaggcccccagcctcagtttccccatccacagagggacactatggacttttcagcccagcctgggttttttcatccccctggcagggctgcatccctaaaggtgagtccctaaaagtgggctctgagcacagggcctggtatacaagcaatgctccagtgtcggcaggcatttctgccagtcctgaccccataaacctggtgtgttttcatcctgattggtggccctgaccccaagcagcttggggttctccgggtcccgggaggagcccatgctgacgttactcgcttgctccaatcttcccgtctctgtgattttctcactttgttcctctctttctctcctagcttttcttgatctttccccacatccctcttcttctttctccaggtctccgctggccctgcccaggcctggagctcagggaaaacgtgggaaacaggcatagggtacgcatccctcactgaagccagccaggcctgcagtcctccatgctctgagccccctgatgaccctcctttggcccccctccaaaccccagcaagaagctggaggctgggtacttgagctgacacagtaggtgaaggagaggctctgtcacagggtcctctgagacccatcacctccaaggtttgcaaacaggtggagccccactgaatccgatggaaaagccaaggcccaagaggaaaccggagtgagttcctcctgcagttccagagagcctccccatcctcgctgtagccaggtcctcaccgaggtagatttgcgggggtctcccagtcccagtcccacacactgcctcatccccactcacagtcaacgcccgcaacaccccgccacccgcagtctgtcgcgcagtgacagcctgtcacaagcaccgccgcacaccggcacaatctgtcgtccacgcacagtctcacacacaacctgtcacacacgcacacacacacacagcggcacagtcgcacacacagccagcctcacgcgatcacaccaagcgtcacagcttgtcacagccatagattcctcacaataaaaataacagctaccgactccagagcaattatgcctgggcagcgggtgggtggggggaaggcgggcatatgtgacctcctgtgaccctcccaacacgaggcaggtatgagtaacctgttttacagatgaggaaacagaggccgcaaggtcaagtgccaaggtcatggggctagaagcagggtggtggggattacccagccagattcccaggagtgagcaagacttaaacaggttcactccagcttttcatcccccttctggccacctgaggctcctccttctggccttcccatgggaattcccttcctattccccagttctaagaagcccagagcaagaaacaggaggaagaggcttcctgattccccgcttaagggtgttcaaactgtctgcccctggctgggaaaacagggccacgccctccccaccaaatgctacttggctccaagtggggtactgatgggcactgaaaaaccgatgggcagtgagggctatcagaggggcaactacaagtacagtagcactaggcttgagtgtctgatgtgtgagtggccatgtggacggctggagttggtccgcagtggtggcagcttgtggtcctttgggggatttggtggtagaacggggccgggggtcttcaaaggcagagaagtctcaggacttcaaaccaacagcctaaccctgtccacacaggtggagtggcccaccttgggcccgggggggcctccaggagccccctggcccaggcaggccccgcctccaccgccccaggggccctccgaggtccagggcgcttcctcctctgcaacccgcttttcccttgctttccccttctttgttcctcccccgcctgctcctggggcttcccccattggagttgcctcggccaaaaccaacagggctccaacgacatcccgccttggcctgccgggcgggcggccggccctgccccatggcccgctcaggggccagatccgggctcagctgggtccggacggcggccctcgcgcacgtggttactcccaaggcgtgcgcaagcactcgcacaccccctggccctgcggccccgaaggggacctaggcgcgctcatgcacgtccctgtctgacaccccagcccggcaactcggacgtgcgcacgcacataagcacgctctcgtatagttgctcccacctgggtccgcagcatgcccttgcccggcgcccccagtcgggatctcaggcaccgaaagcttatatgcgcacctaggcctgacatcccaacgacactggctggcgcacttacacctataacatgcccctatcgggcaccacatgggggtccctaacacaagcattcactcccctgctttccctccgatggagctttcgagcacaggtactcgagccctgcgccccaacggggagctccaggtgggtccgtgagcccgctctggtgcccacacacatggctccaggcccacgcgggtacacacctccccagcctgcacacgcgtgtttcacatgagtcacacacctgccaggccgctcagggcatctggcttcaaagcggcattcaggttgttgcgggagccggcagggaagggaggcctaattccacctcccccatccctctcggaacacccgcctccccatatgtccctggggcacaggtgggacatcccagaactgccgctgcccagtggcgcccctgcatgtgctatatttatatttgaaatttgtacctttatatatactttttatatgtaagaaccgctcccccctcttcccgctccacgtttgtacttggattttaccacccccactaggcttcgacccaaacctgcaaaaaccatttcgccaggcagggatgtagggggaggcgggagcagccctccccctctccactgcggacggacatcccacgttcttaaagaccggggaccccccctcccccaagggccggactgcagctccgaatcccgcagccccagaaacacaatcgcgggggtgggtgctggcggcgagacgttgctttttggtgtgtgtttgctgttaccgcttaaattaaccctgagtgacggcttgcaattcgccacaaagaggccatttaatgccccccaccaccccacctcgggagaaatttccacttgcccccgagtccagctcgggccgcacgctacccgccctccaggccttcgctccaggtgcgcccgggcggtggaggcgagttccctgcgcgcatcatggacttcaggagtgagggtgggtgggttttggaggggtgggagcagaggcaggggggtgtgccgggactccccagacgctccactgcccaatcatagctctttgatatcccagcccggctggagaaagttagatggtactccagcgtctcctccgggtccccggaagagagaagctgggctgcaccccatgttggcacgaacactccctccccagtgcctctgtgcattaggtcgcgtgcctgtacgtaccctacctgagaccgcccctccgccaagtgcgcccctcgacaggtgcccgtcgcccacaggctcctttcattgtagcctccctggaggttctcaaggcgcctggcatttcctggacccgctgcaactgactcaagactggggggagggggctcatggaggtagaggtggtggggaggtctccccagggcccaggcaggaggagggaaggtcgtgtgctttccatgtcgcgggcaaaatgggtgctgacggtcactgtcacttgcatcgcacactgaggggtgggagaggacagcacatgcctggaccgtgcaggaggcccagaaccggggcgcgaaggggccgcgggacacgagcgggccgtgcgcaaagcctggcgcgcgcgtgcgcagcgacgaaaaggcgggaagcggcgcttcgaggccccggatgtcagacgcgacctgtgtggcatgtaccaggctggctccgacgacggaaccgccatgggtgctgagtggagagtggggaccgcggaccccgggggcaggtgaggggaaactgggagcataggtctggctttcgaccgtttgtgccgccagagtcttctcaatgatccctcccaggcaccgtaggccctctagtgggtctgggtggcgtcctcccggcccctcgctgctcaagcgcggctccctcttgccggggcgcggcctgcccctcacagtgacccccccgacccaccccccaaaaagtgaccccgcgctggtgggcatggaggactgtcccagttcaccatttgctgcgtcaaaggccgccgccaaaaggggctccgatgtcggcatttttgccttaaggctagtttgtcccccaggcgcgcgggggttgggggttcagggccgcctgtgcctcagtttctctcctcctgcgcccatcctgacatccgacggaggataatgcgcgttggagggctttggccgtgaatgcgatgttgatgattgctgtgattctttgggtgcttgggagagtttggggtttaactgcccccaaatccgaggacagcttgggggcgtcccttcggagaggatctctccgcgtcgcatagtgagcgtcgtcatctctagactaccccggtttccgaggagcctcaccttcaatccccgagccttctcttttgggggagtaaaggcggggaaatttaccaggggagatttttgtttccagggttggctgggtttgggggattttgtcctccagcgagcgcggggaagaaatgtgactaagtggcagaaaatgcgctttccctttctctctcttctgccttcgggccgcggggagttgcgcagactctaaaaaaaaaacctttaaaaacccaaaacctcccctccaagtccctttcgatctacgccaccttccctctcagggctgatttcttgaatttggggcgtcgaggcctccccacccgttgctaccagcccttttgcagcacttcctgggcaggccaggggagaggacggaaaagtgaaaaaagaacgtgtgcgcccagcggacccgacttaacctgttggtggaggaggaagctggcgtcgggctgaagtcccccgagccacccctggagccagagcagcccccgagcattcagagaaagccgcccgtccccagtcccctcggaagccggtcataaacccgacttctcatcacccgaattacttaaatgagctttgatggtgttaggtccttttccacgtgcggatgactcagcccgctgcagctgcgcccggggaggtgaccctggggcagcggctgaccctgctgcgccctgtaccctggacccagacgcggcccatcccagcagcaccccccgccccaagctcccagaccacacttagctttttttttccccccttactcttcgagtctttttcctcttctctaaaaacattttttttaatttaaaggagttttattacttcttttttttttataaagcatgtgagacagaggctgaatggtagaaacaggctgttaaaaaaagaaaaatacgtgccggtgacgcttcgtggagctggcgagcctcgcctgtcccgcgactgagcttgcggtcgccccgattctctagtagaccctggcgtggggcacctgagatctccgccactgaaaaggcgctatagaaatgcaaggaattatgattttaataaaattgtctcatttaggagcgagcttctgcgctgcctctgtcgtcggagcccgggtttgccacggcaaagtctgtaatcagagaaaaataccagctttgttgagggttagaatatatcattggctaatgtgtgtggttttctttttaaataatgctaagcattggaataattaaagagtgagaaataactcgtctctcctctctcctctccattcagcattgtcttatttaagggcggaaagcgcgcttttcggcagagctggttagtttttaatgcgggctttttttttctcacccgccgttccctccgctccggtctgattcgcaaatccccaaactggcacaaaccgggaaacttgcggccggccgttcttctccccgagttggagacagccctctcctcttccctcccccgcctctgggccctgacccactgcctggtttgcgctagagccgtttaaaaaagaaagaaaggaagaaaggagccgggctctggtaccccgatgccagccgagggcgcgtttcccaggcggcgggctggtgggagagtcaaacccgggtgtggggaagcagcttcgctgcctactctgcatcctctcccctaaaaagaatcaagtatttctagagatcgcctgctcagagggctcagatcccttgtcatattttaaattaaattgaacagttctttctttccagccccatatgcaataggaagagaaaatgcagtcttggagagcccgtcttggcaaccctgtgcccttgatagaagagagagctgcccacttgggctgggcctggcatccagccccagaggagtgctcttgccactggccacagggcctggatttggggaggaagagcagggtccagggccagtggctgagcacggcctggagagatgtgggagttggggaaaggactttttatcagggctgcagaggttcggctctgggctggtggtagggggctggtggtaggcgaggtggctgcggtggcccttccgccaggtgtggggtagaccgcttagaagggaaaggggatcctgaagtgcctgaggaagaaacagcaatgagaaagcaatgggaaaaatgggcaataaatgggcataggggttagtgcccacaggcgctagtggctgtgaagtgcctttgaggtgcaaagggagctttttatgtatttgcttcaggtgtttttcattacatgtgtttcccttttattttccttgttatttggtccttagacttttcagcgatcccttgtattcgtctttttacataagcagaaacttttttttttcctccttagagagatactgtgggaggtattttgccttcagtgctttctctttcctgctttttttaaaatttaattttaaaattataaagtaaatttagtgctagtgaaagtgaggggggaaccagctggggctggagccagggaaggggtaggcagaggcagggttctgcctcccttcctgaggcagccccgccccaggaccctaggcccagcctggtgtcgcttgctcactctctctgctctcttctcttgatgccattctactcccctcaccttcctgcagggttcttgtggacagggatggggacagtgtatcccagtgggtgcccattctccctttgggaacccctggctctgcagagtcattttccttcatgacctacatactgaggccccccattccctgcctgccaggcaagcagggcgagaggaggggcccttgctcccctcagacactaaggctgtttggctttcagctcggcgggtcctgtttgtcccccatacatgccctgttagtctgctaaacccgctgcacagttggttgccctgttgatgggatcagagttgggcaggcatagagagatcacacacacacacacacacacacgcacacgcacacgcactctgcagcagtgaggatgagaggggtttctatttgccacacatttttgtggtcacatgaatagcacactctgctctataacacgtgtatgcacataggtgtttgcatttgatgatactggtgtgacaaggaggtatttctaagccatataaattatgagaactgtatagcttaaaaatttaaggcttgttcagcggtgctgaaaatgtttatttcttaatctgggtggggttacatgggtgtgttcactttgtgaaagtgtatcaagcggcctaacttacagtgtgtgcactttttatacctgccttgcttcagttaaaaagtttacttaaaaaaagaagccccactctcaaaggtaaagaaaaacctgtgcattacaaaatataataaaaatttaaataaaaatttcctccagcctgctttgcttagtccttcctgctaggaatggtgggagggcttgtaaaaaatagcgggctgatataaaagctagcaggcatgtggtccacgaggcatcctgacccgtccacatgtgtggagtgcctgaaaactgcctacagacaggtatagaggtaggattttaacatctcagggctaaaggataagaaatggtgaggagtaagttacttgccaattacattttgctgtcaacatctggaaagcaaaattgcagctgttctctctgcccctgccccccgcccccgcattgccacctcttcttttttttctgcacacttacattttttgtacgcttgccatttatacttcggttttctgcactgttaaaacaattccatggctctgttcaaattgggttgttgggtttgagttttttttttttttttaatggatcttgtagtctgacagtataatttttggagggatttatttaaacaggcccaggagccattgataatcccctcccttttctttcgccctctctgtcttcccagaactgctcaggccagcaatgagggggaggacgctcggcagcccttgccgggctccttcctttagcctctgctcctccgggcaggtactgacagcttcgccctccatggcccttctgtggtgtttttgttttctcttcgccccccaaaaatatttgaaccaaaaagcctcttttttttttcctccacccacagcaaactgaaaggactagtgaaccgtgattcaacagagcgagggcgcctcttttcttccttagcattaattaactcaagttcgttaggacgttgggtctgtcgcccacagttttctcttgtgtgtgctgaatcgggtcatagagggagacttcccgtgcaaacagtttgtgttggagctgaaggacgcagagggggagagagggtgagaaagaaagggagccggggagggacggagcgtggccgaggggtgggcatggtccgagctcctcaaagcacccccggtgtcattctctgcaggggctagacaccagggaaatgtggattcttgggtttcctgggcaatgatcctgataataaaatagttgcgggagcaatacattttgaggaattgaaaaatgacctctttctaactcctaaaattgtacattttggggttctggccactgcctgtggctgaagcaattgcaagaaagaggttccctcaggaccgaggggtgccaggccgatctgagggcaggtggtgaggagaaatccttccttgctccttgtctctcctgtggcgggggaaacagaactggtaaaaaatgaaggggggtgtctggactgatcctgatggagctcttgcagagggactgggaagacctctgccttttgggttttgtcaccttgccctgacccctccgaaggaggggatttgctgtggtgcctggggtgagttttcagcattttgccatttgctctggccttctctctcgacttccagatattttcacagtgtgctgggcacagacctcatcttcacgcgctggtctctctttgccttgccttttgtcactttttcagttcttcttcagaaagagttatgaagctggcctgtgcagttcttccctcttcccgggcccttggccaccatgaagtgacacttcccaagccggttaggtgtgtgaggctctgcacttcccttgcccccggaagcccttccctgtcatctgtccttcacgcacttcggaaggtttcatccccatgcagcctgccggctggagaagagagctttggccttcctggcttttacttctgtttggtgacacaaggaagtttcaagctaaataatgaattaaagagtaggatttttgtttcccattccttgtagaggatgagatgaaagtaaacaatttccagttgccttagagagaatagattgtctcccctaatatccccattcctaccctatattattctgtgccaagagggtaagggagatgtgcctggagcagaggagcatttggagccagaacgaggctgcctgttggcccgatcccaggccaccgctcctggtttgtagtctggaggagaaaaggaaggggcggggggggggggggggcgcggtttacaggagagaagtgtgcggcctggctgtgaggcagaccctgtcctagacccagcactggggtgtggggcgaatccattcagccagcatgaggacactggaaagaaactgcgcagagccgcctttcctgagcagaggaaaacaggcccaagtcagccaaaaacccgctttgtccaaattatccgagctccctcgcaaagtgcattttccggtttccattcctggagtttccagacttttggatgattttgttctgactacagagccccttctcgttggcccccaactgaggggaggccccaccctcctctaggataagcagcagggccccttccctggctgcccagtgctgccgctgcgtcatgtctgcagttcccttcccatctctggccgctgtctggccactgtcttcttgtggccttccacgaagcagcagtaatcttgggacaaggtgggagagctcagggttacgaagccggcttcttttggttcagaccaaggctgaattataaaattccaacaattgggcaaactaattggggccctgtttatggcctttttaatttcccatgtcctttcatacccaggctgcagatatgctttattaaaatggatactggaatatctggtcatttctgtgaagttttgtaagttatttgctctaattgcctgtagttacccagatcaacatgggcccaagtgtccaggatctgaaagaataaatctgggccttaaagccagcaggatgtggacacataggatttttttttttttaagataaagaaggctactaaaagtggccctgtcttaaaatatacaacttcttatgcttctagatgtttcactataggtaggtgcgggcaggttgcaaaacctatctcagtctgggaagattattttgtttccttgaagaatttttaacactgtatatgtgagtgaggtgctgtacatattttcctatttttcttcaaataatccatacaggctcagtggacaggtctgttgtgtagagtttttgaaaaccatgcatttcttctcatggagaagcagtcattttccttaactggtttttctttctctgccgcggtgcagagcccttttctgtcttcttatttttcttcctctgctgttctgtttccctccatctttgtccttctttcttttcagttgtgggcctagcttggcactctctctccaggtttggcttttttctcttttttcgttctccttctctctatttctctttctccgtggccctttcagtctttttctgttgggggtacatttctcctagtgatggctgaaactggcatgggtatgtattttagaaatgtttcagtgaaaactgttgctggttttttttttgtttgtttgttttttttttttttttaccaaatagtactcaacaataaaagacagaggcttttcttccataatggcagcaaaatccctttccacaaaccaaaaacccatatgaatttttaaaaagtcttatttctggcttctcgatgatttttctctccaatgggggaaatacctttcccccacaatgtttcctgcttttccttttttccccccttgtcttttttttttctcttcctattaccagcatcagtggcttcctttccccatttcccatgtccttctactctgtggcctgcatgtccccttgctctttccatcacctgaactcttacacttgccagtgactcagacctggagaagccttgaatcgtatgagggattttttgtcttgattctggtctttggtgcaggatgtaaagcggtctgatctcctgcctggggctggaggggagaagagaaggaggctgggctgggaacaggtaatcttccaacaggagcctccactctttaacaaaagggggacagtttccttttgtctagggctcatgaggggcgtgtctgggctgatggccgccaccagtggcatgcaggaggagggggcccgcagtgaagggtgcttgaaatgtttctaatggaacccgagcaattcctctgtgtgcgcccaaaataggaggggaggaagggagggagggaggaaagagaaatagagaaagagaccttctcatctcccgaagcatcagaatatcctggccactcctccagaaaggcctcctccactgggagccagcagcccatagagagaatggggtgaggggaaagtatttgcctgagaatcttctgcccacctgcaaggttatagccactggcaggagaaggacaattgacaattgttcttcctccaactttctgccctgggaaaggcctgttgcttcttctgttaagagagccttgagggggtgcttggggctctttgtaggtccctgaggctctattgagacactcttctgccgcctctcctctgatctctccgccagtccgtggagttttgacccccaacccctctccaggagccagtcgtgcatcttgtcctgtttccctaacttctacatggatccttccatctgtcatttcccagctgtgggactgttgctgcccccacctctatccctgacccagttgtaccaccagattcagattcaacccatgtcgagcatgtctcttctactgtggcactgtggtctgtgaagtggaacatgccaggattctccaggaggctcgtgttggccattttctgtttggtgtctaatatttagtataaatcagaatacaagaaaaacacctccatgccaaatataaactcacttgtagtttttaatgacctcatcttgactttagaaggtaaaattgtttccacaaggtggagaggcaggatttggtaccttatgtcatgtctctgagctaacatctttggctgattggactgaagctggttattaacatgatgtgaattattggacaccaccctaagaggcctgtctctgataccacctgccttctgtactctcacctctaaccgtttctttcagggatcagccatgagctcagttcacttgagatggataattcagggcacagactggggtcccaggtgttgggcagcccctctcccattgtcagggttcagcgccagcccagggctggatgttttattttggcatgccccaggtgctcttccgggaacctttctgccaacataaaggccacaaagcacagggtttcagttggggaagaaaggggcacgagtgagcagtgaccttttttccgtcgccagctgaggactgagcctcgctgagggagagggcggctgtagggatggggttctgagtggaattggatccctttctccctgtctgcagccacatccttcttcctctgcttttccttttatgtcatatctatttccttcttactgtgtttcgaaggcctcaagcatggctgctccatagctctaactggagagaccccctcagaagtgggactcccctacccagtgctcaccctttctgcttgctgtgaggaaggtccccaagtggaggaccagagcaggggctccccggtgggtcacttctctgtgacttgatttcccccaggtggcctgtttttgatagagccctttgctgttttttgttgtgtcctttcttagctcttttcttttcatttgggtttctcattttatacttttgcactttgcactgctagggtttgggctctttagtctaaattgatttgggagacaggtaagaaaactaatctcaggtcaactggagagggcagatctggagaattaaatgcctgtgcagtggtgaggggcgttggtcagattccttgcctctgctcagaggtagtgtccatctttttgcctttgtcacttctccccgggtctggctgttgtttgtggctgcgtgtagagcttgtcaggcggagtgctgtgacaggaggctattttaataaactgttgcagtttctcgagccgagctgtgttgcgttggcatccctcgtcaccgctaatggagtgtgcgtggctgggtgtgggccgaaggaggaggctgagcttgctgggggctgggggagaagggagggacgtgtggggtgctggcctcccccttgtctgagagtgctccttcagcagccagacctgggggcatcacaaggtggcagtaccctgggcaccagatccctgccctggaagtactgctggcatggacactttctgagctctctttcttcttatttctattcatagcaccgcaggcccgtgtgtatgtggccggggaggaaaacttccactcgcccctgtgtgctccataggaagaaaaaaaaaaagaaagaaagaaatagaaacagaaaaagagagtgtgcaggcccgagagaaagactgaaaccaaaacacagagagaaggcgcagctgcttccccaaggccttctggggctcccgcccgccagcccgccgggagtcaggcctttatttatttatttttcaggcttaaaaaaaaatttcgagtcttccacaatcccagtcccccccaatgccccaccccacccccagatttgctgggtggctgctgccaaatggacccgagtgggagcctggaatgaaaaattcataactgctggactttgcttgttcattagacgtgaacttgtcgattgggcaaattgtttttggtctccaactgccgggggctctccccaccctccctgctcgcccggttccctcctccccttggacgcagccattggctgctcgtggatgtctctttgccaaataggtggatccttctctctctttctctctctctctctctctctctctctgtctctttctccccccacccctttttactggcttggcacaagcaaatggatggggattgagcctgaaaggagagagagagagggagtttgagagagagaaaaggagcaaaaaaaaaaaacaccccaaaaacccaaccagtgcgcacacacacgcgcacactcacacacacgccccatcccatccacgtcctccctcgatcctcgatctctccctcccccccttcttcctttcctccctccctcgctccctctctctcttttgcacgcgtctgccagcaacggtctgcagccggtcagaactcgtcctcttccccgggaatctgcgagctcccccttttcctccgatcaggcagctcgaagtttacacccctgtgccgctgccaaagccgaaagcctttttcttcagctgccgctttttccctcctgggttttgtttttgtttttgttttgcacgggggtggggtggggtgcgttgttggttgtggggagatggtgggaggctggttttgatttttaaattttgcatttttttctttttttttttttttaaactggaagaggatgcacaggggaagaaattgaaaaaaaaattttgttggcttttgtttacctggcgtgtgtggcagccggctcgctccctctctctgcttgctatccctgacctttctttctttttgctccttttcaaaaaaaatattaatttcccccttctgtgcaatggagcatggggggggggaggagggggaagggtttgagaatccacccaagcccggcccctattccccagaacaccaataataaccccctttaaaacatttaccttcctcccctgctcctcctcctcccccctccccccacccgcccccaactcacaactcttttgagtccagaatctcagaatcgggcgttgggctttgccgggtgcttcagatcaatggtaattatttaattttttccagttttatttttgtaaacagaaatcaattattatttaaacttcaaacaagcaaacaaccaaaaaaaaaaaaaaaaaccaaacaaaaccgagagagcccatccttctgtcacctgactgagtgggaaaaagggtgaaggggttgtgggaggctggggaaggggtcgcaagaagacccatgtagcttttaaccctaatgtggccgagacaagcaccttatttgtgctaacaagaagtgttttgttcattattactgtgattaacattagtattggtgtcgataacaaagctgaaatcacatatttaggatttaggtctgattaaaaaatgttggggtggatgttccaactggatcaggagaaaagaaaatgaaaacagcctggggagagggaagcctgatctgtttcctcactcgcttgctcgtggatgtcattttctgtcttcttgggggcggccaaaaatcgaccggtgtcggggaccagaggcggccccgcacgcccccgcgtgtgcgtccacgggcgtctgtgcagacggacactgtgccggggcgagctgacaggagttcacggctgcgatagaacatggagatgtcatgggcgcgacagagcctggcggggataccagcagcgtgtgtgtgtggacggcaacgttgtctgtgcgcgtgtgtgtgagtgagtgagggagagagagagagaataggtgtgtgtagaggctcccggtgcctctgtctggctgctgaggctgagatgggagcaagtggctggcgaagctggtggtggcttcaaaccacactttcgtagaacaatcgcaagagaaaattgttggggggagggaggaggaggagaaggcggttttccttgtgcccccccttctaacgctgcttttctccttctctctttccccctcatcccgtcttcccctcctcccgtcctccctcgccccgcatgctcccggcttgccgcctgcaggatgagttccacccgttcatcgaggcactgctgcctcacgtccgcgctttctcctacacctggttcaacctgcaggcgcggaagcgcaagtacttcaagaagcatgaaaagcggatgtcgaaggacgaggagcgggcggtgaaggacgagctgctgggcgagaagcccgagatcaagcagaagtgggcatcccggctgctggccaagctgcgcaaggacatccggcccgagttccgcgaggacttcgtgctgaccatcacgggcaagaagcccccctgctgcgtgctctccaaccccgaccagaagggcaagatccggcggattgactgcctgcgccaggctgacaaggtgtggcggctggacctggtcatggtgattttgtttaaggggatccccctggaaagtactgatggggagcggctctacaagtcgcctcagtgctcgaaccccggcctgtgcgtccagccacatcacattggagtcacaatcaaagaactggatctttatctggcttactttgtccacactccgggtaggtcgttctcaaccatttttccctctcattttattttccttgctggcatttgttctgtttattgttcctctaatttccaagcgataactcgccatgggcctaactggtgtatgcccgtcctgcggggcctgcaacacggttctatgggcccttttcctttttcctgtcttctgtctcccccgacctgttctattcttcctcctctgccccctggccatggtatcgactttgtgcatctccatctttggaggacttatctgatcagaaagatgctgcaggtcttaggattggggacatgatgcccccagaattatccatgatggtgagagtttgagatgaacaacaacagcaaaccagtaattgctcttattaaaatgagtcagaagaagtattgaggggcaggtgctagttttactgcagcttcacctccagtcccaggaaaaactgggtttggtacaagcgggatgggcaggagtccggtggagagaaggggcatgtgaaaccctgggatatgagactgaatgaacagaaaagaggagagaagacagtagtgggcagattctgtggcctaaatactcaggcg
